United States Patent Application Publication US 2025/0327064 A1 - sequence listing, part 4

SEQ ID NO: 54347 - DNA, 80 bp, synthetic construct
  source 1..80: mol_type = other DNA
atttccttgataataatgaccgagcatctctggttcacaggtcctcctgcttctcttcagcctctttagccttttccttt

SEQ ID NO: 54348 - DNA, 80 bp, synthetic construct
  source 1..80: mol_type = other DNA
ctccctggatactctactgactgcaaatatcagctccaccaatcccagccgttgcttctctgtcacattctcacttcacc

SEQ ID NO: 54349 - DNA, 80 bp, synthetic construct
  source 1..80: mol_type = other DNA
ctccagacaatctccctatgtaacctcttccactccctggaatttaacacagtacacctattgatgccaccaacataaat

SEQ ID NO: 54350 - DNA, 80 bp, synthetic construct
  source 1..80: mol_type = other DNA
tagctgggactacaggcacccaccaccatgcccagctaattttttgtatttttagtagagacggggtttcaccgtgttag

SEQ ID NO: 54351 - DNA, 80 bp, synthetic construct; identical to SEQ ID NO: 14283
  source 1..80: mol_type = other DNA

SEQ ID NO: 54352 - DNA, 80 bp, synthetic construct
  source 1..80: mol_type = other DNA
tgtgctcctaaatagtcttcctaaccacttgtcaaccccaacaatccaatccccacagagtagctagaattagttttaaa

SEQ ID NO: 54353 - DNA, 80 bp, synthetic construct
  source 1..80: mol_type = other DNA
gcactcctgtaatcccagctacttgggaggctgaggcaggagaatctcttgaacccagaaggcagaggctgcagtgagcc

SEQ ID NO: 54354 - DNA, 80 bp, synthetic construct
  source 1..80: mol_type = other DNA
ggctcacgcctgtaatcccagcactttgggagtctcaggcgggcagattacttgaggtcaggagttgaagaccagcctgg

SEQ ID NO: 54355 - DNA, 80 bp, synthetic construct; identical to SEQ ID NO: 14284
  source 1..80: mol_type = other DNA

SEQ ID NO: 54356 - DNA, 80 bp, synthetic construct
  source 1..80: mol_type = other DNA
ccaattcggtctccctggaactttcgtcccttagatcttcacgactgtctacttattttgttttctcagctggatgtcac

SEQ ID NO: 54357 - DNA, 80 bp, synthetic construct
  source 1..80: mol_type = other DNA
tgtaaccttgagagtcgggaccctctctatcttactcaaatagaatgatttgaacctagaagggagcccagtacagagta

SEQ ID NO: 54358 - DNA, 80 bp, synthetic construct
  source 1..80: mol_type = other DNA
acactagaatccttctcctcccggtgagaaatacaggcaaatttcttctttctcctccttctaattggaagaagaattca

SEQ ID NO: 54359 - DNA, 80 bp, synthetic construct; identical to SEQ ID NO: 14285
  source 1..80: mol_type = other DNA

SEQ ID NO: 54360 - DNA, 80 bp, synthetic construct
  source 1..80: mol_type = other DNA
atggatctcatagtgctaaggatctgtgcaagctttagggatttctggatatgatgacaacatagctggggaaaaataga

SEQ ID NO: 54361 - DNA, 80 bp, synthetic construct
  source 1..80: mol_type = other DNA
cattaactttcagccctatgagatgtgaacaatgtccacattctctctgtaaccccacacagagtatatagttttaacct

SEQ ID NO: 54362 - DNA, 80 bp, synthetic construct
  source 1..80: mol_type = other DNA
gcaaatagtatagaaaggttaaaaaagatttgtaataaactctaacctgggccaggtttttagaggatgccttaagtcct

SEQ ID NO: 54363 - DNA, 80 bp, synthetic construct
  source 1..80: mol_type = other DNA
tgtcagagaccttgcatacattacagggtaaacattggagttcagaaagaaaagaaaggaggtaatggggaggccactgg

SEQ ID NO: 54364 - DNA, 80 bp, synthetic construct; identical to SEQ ID NO: 14286
  source 1..80: mol_type = other DNA

SEQ ID NO: 54365 - DNA, 80 bp, synthetic construct
  source 1..80: mol_type = other DNA
ggcaatctctgaagaaaatgtcacaatttcttaaggcacctggcctgggcacaatgttaacaaaactccctattttcccc

SEQ ID NO: 54366 - DNA, 80 bp, synthetic construct
  source 1..80: mol_type = other DNA
gggccagaggagcaggcaagtctcactcagggagaactatgatccccctccacccacattccaaattatggggaggaagt

SEQ ID NO: 54367 - DNA, 80 bp, synthetic construct
  source 1..80: mol_type = other DNA
aaagatttgatccagttgcacgtaaaacactttaactgggtccctatcgtgagccagctctgtgctggtcagtgatgtgt

SEQ ID NO: 54368 - DNA, 80 bp, synthetic construct; identical to SEQ ID NO: 14287
  source 1..80: mol_type = other DNA

SEQ ID NO: 54369 - DNA, 80 bp, synthetic construct
  source 1..80: mol_type = other DNA
tctgagtaaaaatatctttttcaagtgtgtctcctgatgctgtccccaagttcagtggcacctccagaacacacacaggc

SEQ ID NO: 54370 - DNA, 80 bp, synthetic construct
  source 1..80: mol_type = other DNA
tatcttttctttttttttgaggcggagtcttgctctgttacccaggctagagtgcagtggtgcgatcttggctcactgca

SEQ ID NO: 54371 - DNA, 80 bp, synthetic construct; identical to SEQ ID NO: 14288
  source 1..80: mol_type = other DNA

SEQ ID NO: 54372 - DNA, 80 bp, synthetic construct
  source 1..80: mol_type = other DNA
cgcgcaccgccacacctgactggttttcgcattttttggtggagacggggttttgccgtgttggccgggctggactccag

SEQ ID NO: 54373 - DNA, 80 bp, synthetic construct
  source 1..80: mol_type = other DNA
caaagtgccgagattgcagcctctgcccggccgccaccccatctaggaagtgaggagcatctctgcctggccacccatcg

SEQ ID NO: 54374 - DNA, 80 bp, synthetic construct
  source 1..80: mol_type = other DNA
tgtgaagagcgcctctgcccggccgtgaccccgtctgggaactgaggagtgtctctgccccgctgccaccccgtctggga

SEQ ID NO: 54375 - DNA, 80 bp, synthetic construct
  source 1..80: mol_type = other DNA
tggggggcgcctctgcccggctaccccgtcttggaagtgaggagcccctctgcccggctgccaccccttctgggaggtgt

SEQ ID NO: 54376 - DNA, 80 bp, synthetic construct; identical to SEQ ID NO: 14289
  source 1..80: mol_type = other DNA

SEQ ID NO: 54377 - DNA, 80 bp, synthetic construct
  source 1..80: mol_type = other DNA
tttgttcacatgtttatctgctgaccttccctccactattgttctatgaccctgccaaatccccctctccgagaaacacc

SEQ ID NO: 54378 - DNA, 80 bp, synthetic construct
  source 1..80: mol_type = other DNA
ttgttttatcataagggaagatataagacgactttgataactaatacattttagaatgttcaggaaagagaacactaggg

SEQ ID NO: 54379 - DNA, 80 bp, synthetic construct
  source 1..80: mol_type = other DNA
aagtacaactatacttagaacgctctgcattaattcacacgctaccacataggcaatccttcctcatgggccttagtgtt

SEQ ID NO: 54380 - DNA, 80 bp, synthetic construct; identical to SEQ ID NO: 14290
  source 1..80: mol_type = other DNA

SEQ ID NO: 54381 - DNA, 80 bp, synthetic construct
  source 1..80: mol_type = other DNA
tgtagcaattctagttccttcaaaagaatcccctcattatcatccttaccctcccctggaaatgacagcatttgcattta

SEQ ID NO: 54382 - DNA, 80 bp, synthetic construct
  source 1..80: mol_type = other DNA
tgcctcacttactttgggaaaacatacttctattaatatagaaagttcaaaatttcatgggtaaaagtcactattgtccc

SEQ ID NO: 54383 - DNA, 80 bp, synthetic construct
  source 1..80: mol_type = other DNA
tgcttgaacctggaaggtccacgctgcagtgacgcaagatcatgccactgcattccagcctgggtgacagagggacaccc

SEQ ID NO: 54384 - DNA, 80 bp, synthetic construct; identical to SEQ ID NO: 14291
  source 1..80: mol_type = other DNA

SEQ ID NO: 54385 - DNA, 80 bp, synthetic construct
  source 1..80: mol_type = other DNA
tagggccaggcttgttgggcccggtttgggaagtgggagtggccttgctttggggacccagccagcggcatgatcactgt

SEQ ID NO: 54386 - DNA, 80 bp, synthetic construct
  source 1..80: mol_type = other DNA
caagagggagccccaggcacccctgagtggtaggggaagaacttgcagacacatcatccttgccccagatgctggcatgg

SEQ ID NO: 54387 - DNA, 80 bp, synthetic construct
  source 1..80: mol_type = other DNA
gcaggcttccaggtatctgctcccagtgcctggcttctcacctggcctctccaggccccgggtgcccgctttgatctcag

SEQ ID NO: 54388 - DNA, 80 bp, synthetic construct; identical to SEQ ID NO: 14292
  source 1..80: mol_type = other DNA

SEQ ID NO: 54389 - DNA, 80 bp, synthetic construct
  source 1..80: mol_type = other DNA
tggagagagcatagagacaggacagggacatgagggatgagttgctgaggagaggagttaacctccccagcgtctcctct

SEQ ID NO: 54390 - DNA, 80 bp, synthetic construct
  source 1..80: mol_type = other DNA
ctgagctgttctattgcttaataaaggtcctctttgtcctgctaaccctctacttgtctgcatacctcattcttcctgga

SEQ ID NO: 54391 - DNA, 80 bp, synthetic construct
  source 1..80: mol_type = other DNA
taaaagtagttttaagtggacagaaaaattacagagaaagttcatagagttcccacagcccttcttccctaaagcatccc

SEQ ID NO: 54392 - DNA, 80 bp, synthetic construct; identical to SEQ ID NO: 14293
  source 1..80: mol_type = other DNA

SEQ ID NO: 54393 - DNA, 80 bp, synthetic construct
  source 1..80: mol_type = other DNA
ttacccctctctagttcctgttttcccatacatagttacatttcttccatgctagataaactcctaattttagtcagtca

SEQ ID NO: 54394 - DNA, 80 bp, synthetic construct
  source 1..80: mol_type = other DNA
actgtacccctggtgtttcagtgacaaaattatcctatgaagtagtttcgctgacctaaaattgtcccaggctccaccta

SEQ ID NO: 54395 - DNA, 80 bp, synthetic construct
  source 1..80: mol_type = other DNA
tttttcacataacaatatgcatataggttttctcctgtcttttcctagctggatagcttacttctctttaatgttgaata

SEQ ID NO: 54396 - DNA, 80 bp, synthetic construct; identical to SEQ ID NO: 14294
  source 1..80: mol_type = other DNA

SEQ ID NO: 54397 - DNA, 80 bp, synthetic construct
  source 1..80: mol_type = other DNA
cctttgtaacaccccccctttactgcgtgacaaatgggaaactgaaagtgcctctgattggttgttttcaactaatcaga

SEQ ID NO: 54398 - DNA, 80 bp, synthetic construct
  source 1..80: mol_type = other DNA
acaagtttctttacctatggtttaaagaaagcagactcttgagaatgttgcaaatggaataagtgttagctaacatatct

SEQ ID NO: 54399 - DNA, 80 bp, synthetic construct; identical to SEQ ID NO: 14295
  source 1..80: mol_type = other DNA

SEQ ID NO: 54400 - DNA, 80 bp, synthetic construct
  source 1..80: mol_type = other DNA
cagtgactcttcaaaaccgccaaggcctagacctcctcactgctgagaaaggaggactctgcaccttcttaggggaagag

SEQ ID NO: 54401 - DNA, 80 bp, synthetic construct
  source 1..80: mol_type = other DNA
ctctgctcactgcaacctctgccttccaggttgacgccattctcctgcctcagcctcccgagtagctgggactacaggca

SEQ ID NO: 54402 - DNA, 80 bp, synthetic construct
  source 1..80: mol_type = other DNA
gaaactcttataccaacctctggagttgggcaacatgcttctcccttttctaggtcctgtgacagccatcttactattac

SEQ ID NO: 54403 - DNA, 80 bp, synthetic construct; identical to SEQ ID NO: 14296
  source 1..80: mol_type = other DNA

SEQ ID NO: 54404 - DNA, 80 bp, synthetic construct
  source 1..80: mol_type = other DNA
ggactgtaaatgcaccaatcagtactctgtaaaaatgcaccaatcagtgctctgtgtctagctaaaggattgtaaatgca

SEQ ID NO: 54405 - DNA, 80 bp, synthetic construct
  source 1..80: mol_type = other DNA
actcttcacaataaatcttgctgctgctcacgctttgggtccagatcacctttatgagctgtaatactcaccctgagggt

SEQ ID NO: 54406 - DNA, 80 bp, synthetic construct
  source 1..80: mol_type = other DNA
cggacacatatgaacatctgaaggaacaaactcccgacacaccgtctttaagagctgtaacattcaccgcgaaggtctgt

SEQ ID NO: 54407 - DNA, 80 bp, synthetic construct; identical to SEQ ID NO: 14297
  source 1..80: mol_type = other DNA

SEQ ID NO: 54408 - DNA, 80 bp, synthetic construct
  source 1..80: mol_type = other DNA
gcaaactctgcatcccgggttcacgcctttctcctgcctcagcctcctgagtagctgggactacaggcgccggccacaac

SEQ ID NO: 54409 - DNA, 80 bp, synthetic construct
  source 1..80: mol_type = other DNA
atagtctgcactctactatatattttatagaagagcttttatagttcattacatattttcaacaatgtattcttggtaat

SEQ ID NO: 54410 - DNA, 80 bp, synthetic construct
  source 1..80: mol_type = other DNA
gtcatgtctaagaactcagaactcagacagcaggccctagcttctgatgatttttcttatgttttcttctaaacgtttta

SEQ ID NO: 54411 - DNA, 80 bp, synthetic construct; identical to SEQ ID NO: 14298
  source 1..80: mol_type = other DNA

SEQ ID NO: 54412 - DNA, 80 bp, synthetic construct
  source 1..80: mol_type = other DNA
gtaagagttacttcatctctttttccctgtgaaatttgttttacctatgctagttcctttggttctccatatgcatttta

SEQ ID NO: 54413 - DNA, 80 bp, synthetic construct
  source 1..80: mol_type = other DNA
aacacagtaaatctcttcatttcttcagatttttttatttatcagcatttcagcatatggattgtgtacatgttctgttg

SEQ ID NO: 54414 - DNA, 80 bp, synthetic construct
  source 1..80: mol_type = other DNA
tgaccttgtgaatttccttagtagctgaagcagaagaggaaaagcattcagacttccactattaagtacaatttagccgc

SEQ ID NO: 54415 - DNA, 80 bp, synthetic construct
  source 1..80: mol_type = other DNA
taagatggatgacattgattgatttcaaacattaaaccagacttgtgtccctaaaataaacgctatttggcatagtttac

SEQ ID NO: 54416 - DNA, 80 bp, synthetic construct; identical to SEQ ID NO: 14299
  source 1..80: mol_type = other DNA

SEQ ID NO: 54417 - DNA, 80 bp, synthetic construct
  source 1..80: mol_type = other DNA
gtattcctttggtgtactattgatgtcgaagaatctgtagtgatataatgtttccaccccaatattggtgttttttctcc

SEQ ID NO: 54418 - DNA, 80 bp, synthetic construct
  source 1..80: mol_type = other DNA
ggctcactgcaacctccacctcccaggttcaagtgattctcctgcctcagcctcacaagtagctgggattacaggaatgc

SEQ ID NO: 54419 - DNA, 80 bp, synthetic construct
  source 1..80: mol_type = other DNA
ttttttccttcttcttgctttaggttatttttgacaacttttctagatttttgaggtgggaactgagattattgctttct

SEQ ID NO: 54420 - DNA, 80 bp, synthetic construct; identical to SEQ ID NO: 14300
  source 1..80: mol_type = other DNA

SEQ ID NO: 54421 - DNA, 80 bp, synthetic construct
  source 1..80: mol_type = other DNA
tagagactgggtttcaccgtgttagccaggatggtctcgagctcctgacctcgtgatccacctgcctcggcctcccaaag

SEQ ID NO: 54422 - DNA, 80 bp, synthetic construct
  source 1..80: mol_type = other DNA
gtatttttagtagagacggggtttcaccatgttggccaggatggtctcgatctcttgacctcgtgatccacccacctcgg

SEQ ID NO: 54423 - DNA, 80 bp, synthetic construct
  source 1..80: mol_type = other DNA
ctcctgcctcagcctcctgagtagctgggattataggcaagcgccaccacgcccagctaatttttttctatttttagtag

SEQ ID NO: 54424 - DNA, 80 bp, synthetic construct; identical to SEQ ID NO: 14301
  source 1..80: mol_type = other DNA

SEQ ID NO: 54425 - DNA, 80 bp, synthetic construct
  source 1..80: mol_type = other DNA
gttgggtttcattatcttgctgagtttttgtccagttgtttcattaacttttcagagttggtttgtggagtcccaaagtt

SEQ ID NO: 54426 - DNA, 80 bp, synthetic construct
  source 1..80: mol_type = other DNA
attctctgctctgtgcattttatgttatctgatattatagccatttctgctttctttgacaacagttagtatggtttatt

SEQ ID NO: 54427 - DNA, 80 bp, synthetic construct
  source 1..80: mol_type = other DNA
atgtaatgcaattattaatatgtgagctctcatgactgccatttgttttttgtttcctctggtttttgcttctctgtttt

SEQ ID NO: 54428 - DNA, 80 bp, synthetic construct
  source 1..80: mol_type = other DNA
atagtctacttgtgctaagattttttcaatttgactgcagtataaaaactttacctttttatccctttcgctcccgcatt

SEQ ID NO: 54429 - DNA, 80 bp, synthetic construct; identical to SEQ ID NO: 14302
  source 1..80: mol_type = other DNA

SEQ ID NO: 54430 - DNA, 80 bp, synthetic construct
  source 1..80: mol_type = other DNA
ggactccacaaaccaactctgaaaagttaataaaacaactgggcaaaaactcagcaagataatgaaacccaacaaaacta

SEQ ID NO: 54431 - DNA, 80 bp, synthetic construct
  source 1..80: mol_type = other DNA
ctttacccttgttttaggataagtctgctagcatcaaattctcttgattttccttcctctaagaatgtcatggccgggca

SEQ ID NO: 54432 - DNA, 80 bp, synthetic construct
  source 1..80: mol_type = other DNA
aaaagttagccaggcttggtggtgtgtgtctgtaattccagctactcaggaggcagaggtgtgaggatcacacgagcctg

SEQ ID NO: 54433 - DNA, 80 bp, synthetic construct; identical to SEQ ID NO: 14303
  source 1..80: mol_type = other DNA

SEQ ID NO: 54434 - DNA, 80 bp, synthetic construct
  source 1..80: mol_type = other DNA
tccttcaaagactctttgggcatcacccatttgtcatctttctctaagactctagtgacacaaatttcatatcttttgtt

SEQ ID NO: 54435 - DNA, 80 bp, synthetic construct
  source 1..80: mol_type = other DNA
aacgtaaagtatgaagagttccacatctcatagagaaagccgattgtataaagctttcccaagacaaaaccccaggttca

SEQ ID NO: 54436 - DNA, 80 bp, synthetic construct
  source 1..80: mol_type = other DNA
ggaaaacacttgcagttaggtttgatgagatctgtgtaaattttacttcaagatctgaaaagaactctacaacaaatagg

SEQ ID NO: 54437 - DNA, 80 bp, synthetic construct
  source 1..80: mol_type = other DNA
tacattaactgaaggaaggagaatacacatggcaaccacctggatagagtcttgaaatatgatttgacagaactcagcac

SEQ ID NO: 54438 - DNA, 80 bp, synthetic construct; identical to SEQ ID NO: 14304
  source 1..80: mol_type = other DNA

SEQ ID NO: 54439 - DNA, 80 bp, synthetic construct
  source 1..80: mol_type = other DNA
tccaaatctcttgttgaaacatagtctccagtgttggaggtgagaggtattttggtgggcggcacatccttcatcactgg

SEQ ID NO: 54440 - DNA, 80 bp, synthetic construct
  source 1..80: mol_type = other DNA
ggttcgtggtctcagtggctcaggagtgaagctgcagaccttcgcggtgagaccttcgcggtgagtgttacagctcttaa

SEQ ID NO: 54441 - DNA, 80 bp, synthetic construct; identical to SEQ ID NO: 14305
  source 1..80: mol_type = other DNA

SEQ ID NO: 54442 - DNA, 80 bp, synthetic construct
  source 1..80: mol_type = other DNA
acacagggtgctgattggtgtatttacaatccctgagctagatataaggactctccgcgtccctaccagactcaggagcc

SEQ ID NO: 54443 - DNA, 80 bp, synthetic construct
  source 1..80: mol_type = other DNA
agcccatggagtgggtgggaggctcaggcacggcgggctgcaggtcctgagccctgccccgcgggaaggcagctaaggcc

SEQ ID NO: 54444 - DNA, 80 bp, synthetic construct
  source 1..80: mol_type = other DNA
ggaactccagctggcccgcaagcgcctcgcagccccagttcccgcttgtgcctctccctccacacctccctgcaagctga

SEQ ID NO: 54445 - DNA, 80 bp, synthetic construct; identical to SEQ ID NO: 14306
  source 1..80: mol_type = other DNA

SEQ ID NO: 54446 - DNA, 80 bp, synthetic construct
  source 1..80: mol_type = other DNA
tacccagcctcaggtatttctgtttagcaatgtaagaatggactaacacaataatgttctaccataaacaaatagaaaac

SEQ ID NO: 54447 - DNA, 80 bp, synthetic construct
  source 1..80: mol_type = other DNA
tcctgcctcagcctcttgagtagctgggattacaggcatgcaccaccacgtccggctaatttttgtatttttagtagagg

SEQ ID NO: 54448 - DNA, 80 bp, synthetic construct
  source 1..80: mol_type = other DNA
tgtcgcccagactggagtgcggtggtgcgatcttggctcactgcaacctccacctcccgggttcacgccattctctgcct

SEQ ID NO: 54449 - DNA, 80 bp, synthetic construct; identical to SEQ ID NO: 14307
  source 1..80: mol_type = other DNA

SEQ ID NO: 54450 - DNA, 80 bp, synthetic construct
  source 1..80: mol_type = other DNA
ggcacccaatgatctgctgtttgtttctgtaatttacctcttctagatattttaagtaaaggaaatcatacaacatgtaa

SEQ ID NO: 54451 - DNA, 80 bp, synthetic construct
  source 1..80: mol_type = other DNA
tagattgcatagtggtgaagtcagtgtttctgcagtatccatcaccccaatcacatgcattgtccccattaagtaatgtc

SEQ ID NO: 54452 - DNA, 80 bp, synthetic construct
  source 1..80: mol_type = other DNA
gaaggatatttggattgttttcagtatgggcctactatggctaacgctgttctgaacactcaaacacatatctttgtgag

SEQ ID NO: 54453 - DNA, 80 bp, synthetic construct; identical to SEQ ID NO: 14308
  source 1..80: mol_type = other DNA

SEQ ID NO: 54454 - DNA, 80 bp, synthetic construct
  source 1..80: mol_type = other DNA
ctgctaaaaacgtaaaaattagccgggcatggtggcatgcacctgtagtcgcagctactcggtagggtgaggcaggagaa

SEQ ID NO: 54455 - DNA, 80 bp, synthetic construct
  source 1..80: mol_type = other DNA
atttatccaggatctatttagtgaaagaaaggagtttggaatacaacttaccaaaaactgaaactaaatctcaactcttt

SEQ ID NO: 54456 - DNA, 80 bp, synthetic construct
  source 1..80: mol_type = other DNA
attctgcttttttccaaaaatttccctagaaaatatatttacctcataaaataacatgtcagcatacttgagttctaaaa

SEQ ID NO: 54457 - DNA, 80 bp, synthetic construct; identical to SEQ ID NO: 14309
  source 1..80: mol_type = other DNA

SEQ ID NO: 54458 - DNA, 80 bp, synthetic construct
  source 1..80: mol_type = other DNA
cattccattgtttgagaaagtggggtactgggaacactctagaaactgtttagttgattcttataaagacacacggaaaa

SEQ ID NO: 54459 - DNA, 80 bp, synthetic construct
  source 1..80: mol_type = other DNA
gttgagcaaccctggagatgcccagccttggatgtatcagctatgtgagataacgggttaaagaaaagaaaagcccacta

SEQ ID NO: 54460 - DNA, 80 bp, synthetic construct
  source 1..80: mol_type = other DNA
cctcaacttagggaacaaagcgtaattgttgcaactctaggatcaaacagaacagacataattgtcagcttaatatattc

SEQ ID NO: 54461 - DNA, 80 bp, synthetic construct; identical to SEQ ID NO: 14310
  source 1..80: mol_type = other DNA

SEQ ID NO: 54462 - DNA, 80 bp, synthetic construct
  source 1..80: mol_type = other DNA
tgctggctggtttctcatctcaatgtttgacaagtttgtttcagttgttatagtctgttctcagtttttatgcactgcct

SEQ ID NO: 54463 - DNA, 80 bp, synthetic construct
  source 1..80: mol_type = other DNA
aaaccattattctattgggaaataatcttccctttctcttattttttgtccttgcagccaaatggaccagataattttta

SEQ ID NO: 54464 - DNA, 80 bp, synthetic construct
  source 1..80: mol_type = other DNA
aggaagccacaagggagggcattttctgcagagttgctgaacgagtaacaacctggtcctgagagagctcttgtggaaga

SEQ ID NO: 54465 - DNA, 80 bp, synthetic construct; identical to SEQ ID NO: 14311
  source 1..80: mol_type = other DNA

SEQ ID NO: 54466 - DNA, 80 bp, synthetic construct
  source 1..80: mol_type = other DNA
ttctagggaaactgaatctctttctgaaagaggattaaaaggtattacctgttggctgaagtccagagtgtcctgggaaa

SEQ ID NO: 54467 - DNA, 80 bp, synthetic construct
  source 1..80: mol_type = other DNA
gagaagagcagaaacagaccatgtgacccatgaagtgtgaagtgtctgtcacaggatccagtgtaattgcattagcctta

SEQ ID NO: 54468 - DNA, 80 bp, synthetic construct
  source 1..80: mol_type = other DNA
actttatccagggccactgatatactgagaactaaccctagcaaagccaaatttcctcctccagaaaagcctatggaaag

SEQ ID NO: 54469 - DNA, 80 bp, synthetic construct; identical to SEQ ID NO: 14312
  source 1..80: mol_type = other DNA

SEQ ID NO: 54470 - DNA, 80 bp, synthetic construct
  source 1..80: mol_type = other DNA
gaggttaagtagtttgtctagagtgacagagctaataaaaggcagagctgagattggactcccctcatgtcaggaaggtc

SEQ ID NO: 54471 - DNA, 80 bp, synthetic construct
  source 1..80: mol_type = other DNA
ctggcaggtgtgactgcttctccaggaggtacaggtgtttctagaagcgattacagggctacccccagtgacctatgctg

SEQ ID NO: 54472 - DNA, 80 bp, synthetic construct
  source 1..80: mol_type = other DNA
tccacttggcaggtgtaaacctctccactccgaggaactgtttccagcatcaccagggtctggaaggtccaatctccatt

SEQ ID NO: 54473 - DNA, 80 bp, synthetic construct; identical to SEQ ID NO: 14313
  source 1..80: mol_type = other DNA

SEQ ID NO: 54474 - DNA, 80 bp, synthetic construct
  source 1..80: mol_type = other DNA
attgttgaagtgtttacaaatctctgaaagtacagtgtgtattaattaaaactgatacctgagccaggttgcctggttca

SEQ ID NO: 54475 - DNA, 80 bp, synthetic construct
  source 1..80: mol_type = other DNA
tagccttcaatttatgaggtcagaaagcttcccaccccattccactgtgagagggctcatcacacttgggtgctccactt

SEQ ID NO: 54476 - DNA, 80 bp, synthetic construct
  source 1..80: mol_type = other DNA
ccctgggaaggtaggacagacagaaatgattctccaaatctttatgttcctagaaaagcctgagtcctaaagcagagatt

SEQ ID NO: 54477 - DNA, 80 bp, synthetic construct
  source 1..80: mol_type = other DNA
ccatcttggctcactgcaacttctgcctcccaggttcaagtgattctcctgactcagcctcctgagttggtgggactaca

SEQ ID NO: 54478 - DNA, 80 bp, synthetic construct; identical to SEQ ID NO: 14314
  source 1..80: mol_type = other DNA

SEQ ID NO: 54479 - DNA, 80 bp, synthetic construct
  source 1..80: mol_type = other DNA
tagcataccctcaatagtacaattttttgtgagaaggaaggagaaacctggagacaacaataccacaaaatggtagattt

SEQ ID NO: 54480 - DNA, 80 bp, synthetic construct
  source 1..80: mol_type = other DNA
ttagccgaccgtgggggtgcgcgcctgtaatcccagctactcaggaggcagaggcagaagaatcgcttgaatccaggagg

SEQ ID NO: 54481 - DNA, 80 bp, synthetic construct
  source 1..80: mol_type = other DNA
actggagaaaatgctgaataaaatatcaagaaagtgttaataatcttacagtacaaagaacccacaaagtagctgagaaa

SEQ ID NO: 54482 - DNA, 80 bp, synthetic construct; identical to SEQ ID NO: 14315
  source 1..80: mol_type = other DNA

SEQ ID NO: 54483 - DNA, 80 bp, synthetic construct
  source 1..80: mol_type = other DNA
aagaagcttcagaggtgcctcagaggtctcctcaattcgcctagaagttaatctaatgcttttgcaaacaaacaccacgc

SEQ ID NO: 54484 - DNA, 80 bp, synthetic construct
  source 1..80: mol_type = other DNA
cacgagacaaccaaggtctcctctctctccagccccctgcacccacctcccatgtcacctccccacagaggcctccaagg

SEQ ID NO: 54485 - DNA, 80 bp, synthetic construct
  source 1..80: mol_type = other DNA
acacacacacacacacactcaaattcccagctcacagggactcaggcccagccccccgccgcgctcacctcgcggctgca

SEQ ID NO: 54486 - DNA, 80 bp, synthetic construct; identical to SEQ ID NO: 14316
  source 1..80: mol_type = other DNA

SEQ ID NO: 54487 - DNA, 80 bp, synthetic construct
  source 1..80: mol_type = other DNA
gcccaggggctgatcctccgtcttcctgaggcgtacaggggtttgggggaccagggaggaaaactaccaatgattacaag

SEQ ID NO: 54488 - DNA, 80 bp, synthetic construct
  source 1..80: mol_type = other DNA
ttccttcaacagcacccaccgcgttcatcctgtgaacacttccttagtgataaccttgtgccaggcctgcgctgcctcta

SEQ ID NO: 54489 - DNA, 80 bp, synthetic construct
  source 1..80: mol_type = other DNA
tgtggagttctagaacagagaataataggatgatctcaattacattagggtgccagagaaggacccgttgaagaatgaca

SEQ ID NO: 54490 - DNA, 80 bp, synthetic construct; identical to SEQ ID NO: 14317
  source 1..80: mol_type = other DNA

SEQ ID NO: 54491 - DNA, 80 bp, synthetic construct
  source 1..80: mol_type = other DNA
tacaactcatttggcaaatgtcatctgataagggtaagtggtcaaaggtgtctcagagctcttattggtgacatgtgctt

SEQ ID NO: 54492 - DNA, 80 bp, synthetic construct
  source 1..80: mol_type = other DNA
tgaataagtagaagcattttacattgtgaatggtatcaaaagtagaatcactacagaaatctgaggcatgttagtgaaaa

SEQ ID NO: 54493 - DNA, 80 bp, synthetic construct
  source 1..80: mol_type = other DNA
ataattgcagcagcatcactatttgtgacttacaagagcaaactgttgaaagttaatagagatagtgatgaccaacaact

SEQ ID NO: 54494 - DNA, 80 bp, synthetic construct
  source 1..80: mol_type = other DNA
gggcgcaccttgctcttcgggggtgtttcagtctgtggcttgatccagagcaggcttgcaagactgcattcctcaaacaa

SEQ ID NO: 54495 - DNA, 80 bp, synthetic construct; identical to SEQ ID NO: 14318
  source 1..80: mol_type = other DNA

SEQ ID NO: 54496 - DNA, 80 bp, synthetic construct
  source 1..80: mol_type = other DNA
ggaattcagtccagtcttctaaagaaggctgaaattcttgagtttgcttatttaagtcaaaaattttgttttgtaattca

SEQ ID NO: 54497 - DNA, 80 bp, synthetic construct
  source 1..80: mol_type = other DNA
agatgacaaagcaattgctgctgcaactgtaaactttgtacttgttcctctaaccatacaacagtggatttcaacattgc

SEQ ID NO: 54498 - DNA, 80 bp, synthetic construct
  source 1..80: mol_type = other DNA
gcaaaaattatcatgcgtaaggctctatggccatgatgagtaagctgagttagaaaaagtttcacataatgcaaagcagg

SEQ ID NO: 54499 - DNA, 80 bp, synthetic construct; identical to SEQ ID NO: 14319
  source 1..80: mol_type = other DNA

SEQ ID NO: 54500 - DNA, 80 bp, synthetic construct
  source 1..80: mol_type = other DNA
gaagcattataagcttgccaccaatgccagtgaaatttgtgccatgatttctgattattatcttttccatctagttgatc

SEQ ID NO: 54501 - DNA, 80 bp, synthetic construct
  source 1..80: mol_type = other DNA
acaccagttacattaatagaactaagacttaagaagtacatgagttttctgtagtgactcaaccatgtttgagcttgaat

SEQ ID NO: 54502 - DNA, 80 bp, synthetic construct
  source 1..80: mol_type = other DNA
tcaggaggagtgtcactccagagtataggccatactgctggggggattgggaatatatgcccaatatatttttgcctctg

SEQ ID NO: 54503 - DNA, 80 bp, synthetic construct; identical to SEQ ID NO: 14320
  source 1..80: mol_type = other DNA

SEQ ID NO: 54504 - DNA, 80 bp, synthetic construct
  source 1..80: mol_type = other DNA
ggatctttccattttcctttttctggggatttccataacactttcggaaaacctctcctctttttctctaacagtgacca

SEQ ID NO: 54505 - DNA, 80 bp, synthetic construct
  source 1..80: mol_type = other DNA
caacatgtgttgtaatgtttgatgtgcctgctctataatatcttgtcctctaggattataaggaattcctgttttatggg

SEQ ID NO: 54506 - DNA, 80 bp, synthetic construct
  source 1..80: mol_type = other DNA
atatgagaataagtgtctataggcacatgaacatagctaaacttaccaaaggctgctatgtgcgtaatatccatttgcca

SEQ ID NO: 54507 - DNA, 80 bp, synthetic construct
  source 1..80: mol_type = other DNA
tgtacaagtaagggcagaggtgttttgatgcagtaatgcatgagaggtttgagcttgctgaaatacagaatcaatcaatt

SEQ ID NO: 54508 - DNA, 80 bp, synthetic construct; identical to SEQ ID NO: 14321
  source 1..80: mol_type = other DNA

SEQ ID NO: 54509 - DNA, 80 bp, synthetic construct
  source 1..80: mol_type = other DNA
cccagaggtcattattgtttgagtgtgcttgggtccatagatagctgcatgacctttggaagagccatcagtaaaatggt

SEQ ID NO: 54510 - DNA, 80 bp, synthetic construct
  source 1..80: mol_type = other DNA
taactcggcttctgcctctttggtcaattgctgtgggaaatctaatgaagaatctccttgtagggtttcataaagatgtg

SEQ ID NO: 54511 - DNA, 80 bp, synthetic construct
  source 1..80: mol_type = other DNA
tgaagttgtttgtaccttttctggagctattttgagactccatttagttaaagcctgttttgtttctcagaataactgat

SEQ ID NO: 54512 - DNA, 80 bp, synthetic construct
  source 1..80: mol_type = other DNA
taggactgttaagcatgccttcgggtaaaactctccattgatagcaagaaacaggttctctttgattaatagaaggcaca

SEQ ID NO: 54513 - DNA, 80 bp, synthetic construct; identical to SEQ ID NO: 14322
  source 1..80: mol_type = other DNA

SEQ ID NO: 54514 - DNA, 80 bp, synthetic construct
  source 1..80: mol_type = other DNA
tcctgacgtcctatcccttttctatctgtttttccagttattgatatcgggttaggttttccttgtaggaatttccctaa

SEQ ID NO: 54515 - DNA, 80 bp, synthetic construct
  source 1..80: mol_type = other DNA
gaccaagacaaggtaaaatgtcagcactctgttgaacacttgtagctgctcttattcccactagggatgtggaggttagt

SEQ ID NO: 54516 - DNA, 80 bp, synthetic construct
  source 1..80: mol_type = other DNA
tcccaaaccctgtatttcctcgtttctcctttcatggacaaggatgtaatttgcagggaataagcaacaattgagcaata

SEQ ID NO: 54517 - DNA, 80 bp, synthetic construct; identical to SEQ ID NO: 14323
  source 1..80: mol_type = other DNA

SEQ ID NO: 54518 - DNA, 80 bp, synthetic construct
  source 1..80: mol_type = other DNA
ttctagtttcccgacaagtgggtgctgttttgatgaaattttgagtggcactgattagcccagtgacttccttggttaca

SEQ ID NO: 54519 - DNA, 80 bp, synthetic construct
  source 1..80: mol_type = other DNA
ttgtcaactgctaaattagccactgcctgcactaatattgtagagcaatgaagctcagttcccacatcttgacaagctct

SEQ ID NO: 54520 - DNA, 80 bp, synthetic construct
  source 1..80: mol_type = other DNA
gcataaggttcctgtgacccttgcatgatatgtaaaaaggattgtaatgggactcccttttccggaattgtgaaattgtg

SEQ ID NO: 54521 - DNA, 80 bp, synthetic construct; identical to SEQ ID NO: 14324
  source 1..80: mol_type = other DNA

SEQ ID NO: 54522 - DNA, 80 bp, synthetic construct
  source 1..80: mol_type = other DNA
ggaaaagtgcaaggtcctaagggctctccagctatggcagcagggtgtaaaattctctgtattggagtctctatttttgc

SEQ ID NO: 54523 - DNA, 80 bp, synthetic construct
  source 1..80: mol_type = other DNA
ataatggcagaaggacagtatggactaaactccaagtggagaaaacggaaggaccaactttgagacctttttgatgagcc

SEQ ID NO: 54524 - DNA, 80 bp, synthetic construct
  source 1..80: mol_type = other DNA
ctcctgcagcatcttagttaatgtctgagatctaacctgagcaccagattatttcaacaaaactttaagcaactgcacat

SEQ ID NO: 54525 - DNA, 80 bp, synthetic construct; identical to SEQ ID NO: 14325
  source 1..80: mol_type = other DNA

SEQ ID NO: 54526 - DNA, 80 bp, synthetic construct
  source 1..80: mol_type = other DNA
cttccttcgtatttactgaaaagagatagcaagaagggagtggttgtcggtctgctgcttgctccagagcagccttgcaa

SEQ ID NO: 54527 - DNA, 80 bp, synthetic construct
  source 1..80: mol_type = other DNA
tattgccgcagtggaaatgctgagttggtcatgattctccggactctggctctctacactaaatggattcaacaagaaag

SEQ ID NO: 54528 - DNA, 80 bp, synthetic construct
  source 1..80: mol_type = other DNA
gatcacaaggtcagaagatcgagaccatcctggctaacacggtgaaacctcatctctactaaaaaaatacaaaaaattag

SEQ ID NO: 54529 - DNA, 80 bp, synthetic construct; identical to SEQ ID NO: 14326
  source 1..80: mol_type = other DNA

SEQ ID NO: 54530 - DNA, 80 bp, synthetic construct
  source 1..80: mol_type = other DNA
gaaccatgggtgtgaaccatctgaaaaaatctgtgttgaacaagccactattagttatggagcagctgagaattactttg

SEQ ID NO: 54531 - DNA, 80 bp, synthetic construct
  source 1..80: mol_type = other DNA
gttatagcatcttctttcttactttctgtgccactggtccaccaattatctgtagtaatgaatcacaaccacagccattt

SEQ ID NO: 54532 - DNA, 80 bp, synthetic construct
  source 1..80: mol_type = other DNA
cagacagtttacaaaaaatgagcaggtccccagactttgagtacgaccttcgtaaagcttcctttcccctttagaaatga

SEQ ID NO: 54533 - DNA, 80 bp, synthetic construct; identical to SEQ ID NO: 14327
  source 1..80: mol_type = other DNA

SEQ ID NO: 54534 - DNA, 80 bp, synthetic construct
  source 1..80: mol_type = other DNA
tccactatacattggaactagcagcccttgcatctctgctcccacttcaagaaacaacctggtacatatgaatatcagga

SEQ ID NO: 54535 - DNA, 80 bp, synthetic construct
  source 1..80: mol_type = other DNA
taacagcatcatcttcacaggattatttttaagtgtaaaattaaataatgacttcttagcactgaccacataataaacac

SEQ ID NO: 54536 - DNA, 80 bp, synthetic construct
  source 1..80: mol_type = other DNA
ggcagaaacactagcttatgtctaacaatgcagtatacctaaacaaacctcagacaaaaggcacctgctgacataggaga

SEQ ID NO: 54537 - DNA, 80 bp, synthetic construct; identical to SEQ ID NO: 14328
  source 1..80: mol_type = other DNA

SEQ ID NO: 54538 - DNA, 80 bp, synthetic construct
  source 1..80: mol_type = other DNA
gttcacaggtcctcctgcttctcttcagcctctttagccttttcctttagattcagctggcttcctgaacctagagcaca

SEQ ID NO: 54539 - DNA, 80 bp, synthetic construct
  source 1..80: mol_type = other DNA
ctcacttcacccacttagtgatactcattggcttctcccttcttcttgaaaaaaaatctattttccttgacttacaagca

SEQ ID NO: 54540 - DNA, 80 bp, synthetic construct
  source 1..80: mol_type = other DNA
ctggaatttaacagagtacatgtattgatgctgtcaacataaacacctccagccctgaactcaccgtgagtctcttaaat

SEQ ID NO: 54541 - DNA, 80 bp, synthetic construct; identical to SEQ ID NO: 14329
  source 1..80: mol_type = other DNA

SEQ ID NO: 54542 - DNA, 80 bp, synthetic construct
  source 1..80: mol_type = other DNA
ccatgcagtagcttcccatatctgtttaaataaaattaaaatttcttactatgtgcatcagggcctaatatgatgaggct

SEQ ID NO: 54543 - DNA, 80 bp, synthetic construct
  source 1..80: mol_type = other DNA
ccccattgtgtctctctggaacattcgacccttagatcttcacatggctgtttacttattttgttgtctcagctgaatgt

SEQ ID NO: 54544 - DNA, 80 bp, synthetic construct
  source 1..80: mol_type = other DNA
aaagtgtagaaactttacctcctttatatccctttccacttctgcatgtgtaatatatattttttattttctctacttgc

SEQ ID NO: 54545 - DNA, 80 bp, synthetic construct
  source 1..80: mol_type = other DNA
tcaagcacttcctttagcccttgttttaacataaatctgctagcatgaaagtctcttgattttccttcctctaagtatgt

SEQ ID NO: 54546 - DNA, 80 bp, synthetic construct; identical to SEQ ID NO: 14330
  source 1..80: mol_type = other DNA

SEQ ID NO: 54547 - DNA, 80 bp, synthetic construct
  source 1..80: mol_type = other DNA
tatacattctaggttaacgttcctttcagccattaaaacatcttgtgccacttctgtctggtctgcatgatttctaatga

SEQ ID NO: 54548 - DNA, 80 bp, synthetic construct
  source 1..80: mol_type = other DNA
gaaaatagtcaatcttccttcaaacactctttgggcatcacccatttgtcatctccttctaagactccagtgacacaaat

SEQ ID NO: 54549 - DNA, 80 bp, synthetic construct
  source 1..80: mol_type = other DNA
tgcatgtaatgaataaattattcaaaatgtacaatgtactgaagctgacaaataacataagacagaaagagttccacatc

SEQ ID NO: 54550 - DNA, 80 bp, synthetic construct; identical to SEQ ID NO: 14331
  source 1..80: mol_type = other DNA

SEQ ID NO: 54551 - DNA, 80 bp, synthetic construct
  source 1..80: mol_type = other DNA
atccattagtgtgattcacgacattaactgaaggaaggagaatacacatgcaaccacctggatagagtcgtgaaatacga

SEQ ID NO: 54552 - DNA, 80 bp, synthetic construct
  source 1..80: mol_type = other DNA
agtgaaatattgaaaactatctccttcatatcaggagtactagaggagttaggcaataataatggcaagaaaaatatatc

SEQ ID NO: 54553 - DNA, 80 bp, synthetic construct
  source 1..80: mol_type = other DNA
actgatatagtttggatgcttgtgccctccagatctcatgttaaaatgtaacctccattgttggaggtgaggcctggtga

SEQ ID NO: 54554 - DNA, 80 bp, synthetic construct; identical to SEQ ID NO: 14332
  source 1..80: mol_type = other DNA

SEQ ID NO: 54555 - DNA, 80 bp, synthetic construct
  source 1..80: mol_type = other DNA
cctctttgctttttcttctacttttttcaacttaaatttgcttctttttattattaagttaaaattttacccctttgatt

SEQ ID NO: 54556 - DNA, 80 bp, synthetic construct
  source 1..80: mol_type = other DNA
agattatttagaaatgtattattttacttccaaaaatttaggccgttttctcaatcctactaatttgtaatttcataaga

SEQ ID NO: 54557 - DNA, 80 bp, synthetic construct
  source 1..80: mol_type = other DNA
taaatgccaactaagtcaagaaggtggaaagtattgttcctatcttgatttccttcctgatctttgcacgaagctacaga

SEQ ID NO: 54558 - DNA, 80 bp, synthetic construct; identical to SEQ ID NO: 14333
  source 1..80: mol_type = other DNA

SEQ ID NO: 54559 - DNA, 80 bp, synthetic construct
  source 1..80: mol_type = other DNA
atatctgtttgctcttatagtaatagtgacaattctcgtaattttccacctcctaactggcattatggtttatgattttt

SEQ ID NO: 54560 - DNA, 80 bp, synthetic construct
  source 1..80: mol_type = other DNA
aaaattcaccgagactgtaacaacctagagtggaaatactgtattattcaaactactcaaagggttacaccaatatatgc

SEQ ID NO: 54561 - DNA, 80 bp, synthetic construct
  source 1..80: mol_type = other DNA
tgaatttggaaatgtttttgttattccaaaccgtggctcaacaaacgaccaattttatgtctcgttgggctcatgtagga

SEQ ID NO: 54562 - DNA, 80 bp, synthetic construct; identical to SEQ ID NO: 14334
  source 1..80: mol_type = other DNA

SEQ ID NO: 54563 - DNA, 80 bp, synthetic construct
  source 1..80: mol_type = other DNA
gattagttaacaatttttcataagaaagcccattgtctgccttatgtgatcaaaatttttcctgagcatcatatacttct

SEQ ID NO: 54564 - DNA, 80 bp, synthetic construct
  source 1..80: mol_type = other DNA
cactcattgtacatgtaaaattgaataatttgagtaaattaatagatttgtgcaattatcacaacaatttagttttagaa

SEQ ID NO: 54565 - DNA, 80 bp, synthetic construct
  source 1..80: mol_type = other DNA
tccttcacttagttaacactattgaagttcactagttttgtagtatgtatcatcattttgttttcttttcatttcttttt

SEQ ID NO: 54566 - DNA, 80 bp, synthetic construct; identical to SEQ ID NO: 14335
  source 1..80: mol_type = other DNA

SEQ ID NO: 54567 - DNA, 80 bp, synthetic construct
  source 1..80: mol_type = other DNA
gattccaaggagtgaaattgctaggtcatagggcaaacatatgttaaactttttaagaaattgccaaattaccaggtatt

SEQ ID NO: 54568 - DNA, 80 bp, synthetic construct
  source 1..80: mol_type = other DNA
ttagtgaaagaaatgaatttggaattcaacttaccaaaaactgaaactaaatctcagctctttctgtttctatttctaga

SEQ ID NO: 54569 - DNA, 80 bp, synthetic construct
  source 1..80: mol_type = other DNA
tgtcagcatacttaactgagttgtacaaacaatcaatcctgtttgcttgcttttttttattgtaattgagttaatggctg

SEQ ID NO: 54570 - DNA, 80 bp, synthetic construct; identical to SEQ ID NO: 14336
  source 1..80: mol_type = other DNA

SEQ ID NO: 54571 - DNA, 80 bp, synthetic construct
  source 1..80: mol_type = other DNA
ctggaaacagtttagttgctccttataaaggcacacaggagaaaggagtatccttttcctgcctttgggagttgttgtga

SEQ ID NO: 54572 - DNA, 80 bp, synthetic construct
  source 1..80: mol_type = other DNA
tatcggctatgtgagataacgggttaaagaaaaataaagccactagatgggatttcctgctattagcagcagaacgcatc

SEQ ID NO: 54573 - DNA, 80 bp, synthetic construct
  source 1..80: mol_type = other DNA
atttctataggatttatactcttacaggatttatatgcacttgtactgctacgtatgtacaagtaacatataactaaaaa

SEQ ID NO: 54574 - DNA, 80 bp, synthetic construct; identical to SEQ ID NO: 14337
  source 1..80: mol_type = other DNA

SEQ ID NO: 54575 - DNA, 80 bp, synthetic construct
  source 1..80: mol_type = other DNA
cctttttaaatgttaggattacttttttaattgacaagtaaaaattgtatagtatatttatgttgtacagcatgaagttt

SEQ ID NO: 54576 - DNA, 80 bp, synthetic construct
  source 1..80: mol_type = other DNA
atttaactccatctttgagaaacatttaataatgtaatgtgtttgtcatacagggtgaatacagatgcacgggaggccat

SEQ ID NO: 54577 - DNA, 80 bp, synthetic construct
  source 1..80: mol_type = other DNA
gaagaataactgccaagcaggaaagcttttcatcctgcaaagccggggcagaaagttcttccttgaatgtggtcatctgc

SEQ ID NO: 54578 - DNA, 80 bp, synthetic construct; identical to SEQ ID NO: 14338
  source 1..80: mol_type = other DNA

SEQ ID NO: 54579 - DNA, 80 bp, synthetic construct
  source 1..80: mol_type = other DNA
tttattgtgaagatcaaaagaacaaaacttccacagcagggaagaggacctgagtgggttgccactgctggttggggtgg

SEQ ID NO: 54580 - DNA, 80 bp, synthetic construct
  source 1..80: mol_type = other DNA
aattggtccattttacaaacatccagctagccacagagaacctattggtgtgtttttacaaagcactgattggtgcattt

SEQ ID NO: 54581 - DNA, 80 bp, synthetic construct
  source 1..80: mol_type = other DNA
tggcgggcgcctgtagtcccagctacttgggaggctgaggcaggagaatggcgtgaacccgggaggcggagcttgcagtg

SEQ ID NO: 54582 - DNA, 80 bp, synthetic construct; identical to SEQ ID NO: 14339
  source 1..80: mol_type = other DNA

SEQ ID NO: 54583 - DNA, 80 bp, synthetic construct
  source 1..80: mol_type = other DNA
agaaacagaccatgtgacccatgaagcctgaagtgtctgtcacaggatccagtgtaattccattagccttagtggctctt

SEQ ID NO: 54584 - DNA, 80 bp, synthetic construct
  source 1..80: mol_type = other DNA
tagcaggacattagagccgtttggggaaagaaaggctttattcagggccactcatatactgagaactaacctcagcaaag

SEQ ID NO: 54585 - DNA, 80 bp, synthetic construct
  source 1..80: mol_type = other DNA
accgtgctcctgagagaggaagccaggtttagtgatgtttattccaaattgaacctttttacttgagactctaagattta

SEQ ID NO: 54586 - DNA, 80 bp, synthetic construct; identical to SEQ ID NO: 14340
  source 1..80: mol_type = other DNA

SEQ ID NO: 54587 - DNA, 80 bp, synthetic construct
  source 1..80: mol_type = other DNA
ttcaaaagagggacagtctctcccgcctggcaggcgagactgcttctccaggaggtacaggtgtttctagaaacacctac

SEQ ID NO: 54588 - DNA, 80 bp, synthetic construct
  source 1..80: mol_type = other DNA
gtgagagggcttgtcacgcttgggtgctccacttggcaggtgtaaacctctccacttcgaggaactgtttccagcatcac

SEQ ID NO: 54589 - DNA, 80 bp, synthetic construct
  source 1..80: mol_type = other DNA
tttgaaggatatacagtcaccttaggttggactaggagaaaaacaacgtagagggaatgagtcaggaagacagagtaagt

SEQ ID NO: 54590 - DNA, 80 bp, synthetic construct
  source 1..80: mol_type = other DNA
gaccttacagtgtcatcagcctggaatttaatcttgacagtgaggacccattagatttgagaggtgttgtgaaaaattgt

SEQ ID NO: 54591 - DNA, 80 bp, synthetic construct; identical to SEQ ID NO: 14341
  source 1..80: mol_type = other DNA

SEQ ID NO: 54592 - DNA, 80 bp, synthetic construct
  source 1..80: mol_type = other DNA
agggcactcatcacacttgagtgctccacttggcacctatttatcatccttgtacaccttgacagaaaaatatgatttaa

SEQ ID NO: 54593 - DNA, 80 bp, synthetic construct
  source 1..80: mol_type = other DNA
ttcctagaaaagcatgagtcctgaagcagagagaaggattagggaacgtcatttaagttttgaaagttcttatatttaca

SEQ ID NO: 54594 - DNA, 80 bp, synthetic construct
  source 1..80: mol_type = other DNA
tactctcaataaatacaactatttttttagaagtaaggagaaacctggagacaacaatgccacaaaatggcagatttcag

SEQ ID NO: 54595 - DNA, 80 bp, synthetic construct; identical to SEQ ID NO: 14342
  source 1..80: mol_type = other DNA

SEQ ID NO: 54596 - DNA, 80 bp, synthetic construct
  source 1..80: mol_type = other DNA
gtgaggtgagttgtgtcacaaatattatatataaaagaataatatgtaactactagaaaactaccagcattataataaaa

SEQ ID NO: 54597 - DNA, 80 bp, synthetic construct
  source 1..80: mol_type = other DNA
atctattgcttttacaaacaaacagcacacacttttaattcagagattacacgaagggtgtatgccagggagagtctgga

SEQ ID NO: 54598 - DNA, 80 bp, synthetic construct
  source 1..80: mol_type = other DNA
ttgtcacctccccacagaggtctccaaggataagaaacagccccctcctgcctcccctcccacaacagacacacagacac

SEQ ID NO: 54599 - DNA, 80 bp, synthetic construct; identical to SEQ ID NO: 14343
  source 1..80: mol_type = other DNA

SEQ ID NO: 54600 - DNA, 80 bp, synthetic construct
  source 1..80: mol_type = other DNA
tcctggttatagaagtatctgtccaggaaccgcacccgctccgtcccattgaagaaatgacactccctcttaggctgcca

SEQ ID NO: 54601 - DNA, 80 bp, synthetic construct
  source 1..80: mol_type = other DNA
tcatcctccgtcttcctgaggcgaacgggggcctgggggaccatgcgggaaaaccccttctcatccccaggcttttggga

SEQ ID NO: 54602 - DNA, 80 bp, synthetic construct
  source 1..80: mol_type = other DNA
cgcgttcaccctgtgaacacttccttagtgatgaccttgtgccaggcctgcgctgcctctaggaatccaaacgagggaaa

SEQ ID NO: 54603 - DNA, 80 bp, synthetic construct; identical to SEQ ID NO: 14344
  source 1..80: mol_type = other DNA

SEQ ID NO: 54604 - DNA, 80 bp, synthetic construct
  source 1..80: mol_type = other DNA
agcctggtacatatgaatatcagaaattgtgtcaataattcagacacaatatagtcactactcactaatgatggtcaaac

SEQ ID NO: 54605 - DNA, 80 bp, synthetic construct
  source 1..80: mol_type = other DNA
tcttagcactgatcacataataaacactcgaatacattcccattttaacttttctgatcctataactgcagctcatatta

SEQ ID NO: 54606 - DNA, 80 bp, synthetic construct
  source 1..80: mol_type = other DNA
aaaagcatctgctgacatagaagaaacggactttctatatgctcagatttaaactgcaatctgatttccagcactaaatt

SEQ ID NO: 54607 - DNA, 80 bp, synthetic construct; identical to SEQ ID NO: 14345
  source 1..80: mol_type = other DNA

SEQ ID NO: 54608 - DNA, 80 bp, synthetic construct
  source 1..80: mol_type = other DNA
tttcctttaggttcagctggctccctgaacccagagaacaatccttccctgaagctctctactcaaaacagtcaacctta

SEQ ID NO: 54609 - DNA, 80 bp, synthetic construct
  source 1..80: mol_type = other DNA
ctcccttctccttgaaaataatctattttcctggacttacacacatgatgttctcttggtttttctccagcatccttggg

SEQ ID NO: 54610 - DNA, 80 bp, synthetic construct
  source 1..80: mol_type = other DNA
aaatgccattgaccttcggatttctccacataaatgtcaatcaatcatctcatatttaaacaaaacttttatttcaaacc

SEQ ID NO: 54611 - DNA, 80 bp, synthetic construct; identical to SEQ ID NO: 14346
  source 1..80: mol_type = other DNA

SEQ ID NO: 54612 - DNA, 80 bp, synthetic construct
  source 1..80: mol_type = other DNA
gtcaggagatcgagaccatcctggctaacacggtgaaaccctatccctactaaaaatacaaaaaattagccaggtgtggt

SEQ ID NO: 54613 - DNA, 80 bp, synthetic construct
  source 1..80: mol_type = other DNA
taaataaataataaaatttaatttttttttactgtggacatcagagcctataatgatgaggctcctgaattcctctctgt

SEQ ID NO: 54614 - DNA, 80 bp, synthetic construct
  source 1..80: mol_type = other DNA
ttttgttgtctcagctgaatgtcactttctcaggtggagctccctaacatatgaactaaagtaggtgaatccatgtctct

SEQ ID NO: 54615 - DNA, 80 bp, synthetic construct; identical to SEQ ID NO: 14347
  source 1..80: mol_type = other DNA

SEQ ID NO: 54616 - DNA, 80 bp, synthetic construct
  source 1..80: mol_type = other DNA
ctcctcccagtgataaatacaggcaaacttcttttttctcctccttctagttggaagaagaattcacagataaagaaaca

SEQ ID NO: 54617 - DNA, 80 bp, synthetic construct
  source 1..80: mol_type = other DNA
cagttcaagaccagcctgggcaacatggcaaaatctcatgtctaccaaaattacaaaaattagctgggcgtggttgcctg

SEQ ID NO: 54618 - DNA, 80 bp, synthetic construct
  source 1..80: mol_type = other DNA
atagtgctaaggttctgtgcaagctttagagatttctggaaatgatgacaacatagctggggaaaaatagaaactggagg

SEQ ID NO: 54619 - DNA, 80 bp, synthetic construct
  source 1..80: mol_type = other DNA
ccctatgagacgtgaacaatgttcacatcatctcggtaaccccacacagagtatatagtttgaacattattaaatttctg

SEQ ID NO: 54620 - DNA, 80 bp, synthetic construct; identical to SEQ ID NO: 14348
  source 1..80: mol_type = other DNA

SEQ ID NO: 54621 - DNA, 80 bp, synthetic construct
  source 1..80: mol_type = other DNA
catacactacagggatacaggccttataaacattggagttcagcaagaaaagaaaggagataatggggaggccactgggt

SEQ ID NO: 54622 - DNA, 80 bp, synthetic construct
  source 1..80: mol_type = other DNA
ctgtatggggaatttattttagaatccttatttctaaatcctctaaagaccctgaggacatgtgatgcaaaggttttatt

SEQ ID NO: 54623 - DNA, 80 bp, synthetic construct
  source 1..80: mol_type = other DNA
caatctctgaagaaaacgtcacaatttcttaagggacatggcctgggcacaatgttaacaaaactccctattttccccac

SEQ ID NO: 54624 - DNA, 80 bp, synthetic construct; identical to SEQ ID NO: 14349
  source 1..80: mol_type = other DNA

SEQ ID NO: 54625 - DNA, 80 bp, synthetic construct
  source 1..80: mol_type = other DNA
ggtttgaaccagttgcatgtaaaacaccttaattggggagctattgtagccagctctgtgctggtcagtgatgtgttcac

SEQ ID NO: 54626 - DNA, 80 bp, synthetic construct
  source 1..80: mol_type = other DNA
gatttgggaaaattacgtcatgtctcacagttgaaatgaaggcaccatgatctttcaggtctttcaacactagaaaatgt

SEQ ID NO: 54627 - DNA, 80 bp, synthetic construct
  source 1..80: mol_type = other DNA
taaaggaaattgaaagttagttaataatttaatctgagtaaaaagagttttttcaagtgtgtctcctgatgctgccccca

SEQ ID NO: 54628 - DNA, 80 bp, synthetic construct; identical to SEQ ID NO: 14350
  source 1..80: mol_type = other DNA

SEQ ID NO: 54629 - DNA, 80 bp, synthetic construct
  source 1..80: mol_type = other DNA
atcacttgaggtcaggagtaccagaccagcctggccgacacggtgaaatcccatctctactaaaaaaatacaaaaatcag

SEQ ID NO: 54630 - DNA, 80 bp, synthetic construct
  source 1..80: mol_type = other DNA
ggctttgctaactagtacgttacagaatgttcaggaaacagaaccctagggaaaatctatgaattacatcagttgatgta

SEQ ID NO: 54631 - DNA, 80 bp, synthetic construct
  source 1..80: mol_type = other DNA
gcattaattcacaccctaccacagttctgacaggcactccttccttatgtgccttagtgtttctaggaatgagatactca

SEQ ID NO: 54632 - DNA, 80 bp, synthetic construct
  source 1..80: mol_type = other DNA
gagtgagggaaatacccttttcatccttacaagtggagagaataaaatgatggagtttaaacaacttttgcaaggatgca

SEQ ID NO: 54633 - DNA, 80 bp, synthetic construct; identical to SEQ ID NO: 14351
  source 1..80: mol_type = other DNA

SEQ ID NO: 54634 - DNA, 80 bp, synthetic construct
  source 1..80: mol_type = other DNA
taattcatggctgtgcaaatcagtaagactacttcttttaatgaatggcaacattttatagactttgggggtagatactg

SEQ ID NO: 54635 - DNA, 80 bp, synthetic construct
  source 1..80: mol_type = other DNA
tgttacataaggacacccatagctcctgcacaaatctccttcttattaaagataacaacagcctcaacattcctaactcc

SEQ ID NO: 54636 - DNA, 80 bp, synthetic construct
  source 1..80: mol_type = other DNA
gtggaaagttgaagatttcttggagaggttggttagaagtcactattgtccctggatttgagaataaactgtgttcccac

SEQ ID NO: 54637 - DNA, 80 bp, synthetic construct
  source 1..80: mol_type = other DNA
ggaaaggaagctaaggttcaccttagtattacaggataaaagtggaggcaaaaataagtaattctacatcaagaatgtac

SEQ ID NO: 54638 - DNA, 80 bp, synthetic construct; identical to SEQ ID NO: 14352
  source 1..80: mol_type = other DNA

SEQ ID NO: 54639 - DNA, 80 bp, synthetic construct
  source 1..80: mol_type = other DNA
tcatgagtgaggagccctacctgaattttaaaggagacacacttatactacaacagatgtgcttctttaaattacatatc

SEQ ID NO: 54640 - DNA, 80 bp, synthetic construct
  source 1..80: mol_type = other DNA
atacgagagattatttcctgaggaaatggcaataaaattggtttctggaagaaagtggttttcagtacggaacttccacg

SEQ ID NO: 54641 - DNA, 80 bp, synthetic construct
  source 1..80: mol_type = other DNA
ttcacagaatggggctcacttgcagtaagcctgaaagcttgcaacacattttggaaaaataggctcttttggctatcagc

SEQ ID NO: 54642 - DNA, 80 bp, synthetic construct; identical to SEQ ID NO: 14353
  source 1..80: mol_type = other DNA

SEQ ID NO: 54643 - DNA, 80 bp, synthetic construct
  source 1..80: mol_type = other DNA
taacagaatccttgccattgcatagttatagagagaacaactagaattcccataggcctttgtactaatattgtaagtac

SEQ ID NO: 54644 - DNA, 80 bp, synthetic construct
  source 1..80: mol_type = other DNA
aggatttggcagggtcatgggacaatagtggagggaaggtcagcagataaacaagtgaacaaaggtctctggttttccta

SEQ ID NO: 54645 - DNA, 80 bp, synthetic construct; identical to SEQ ID NO: 14354
  source 1..80: mol_type = other DNA

SEQ ID NO: 54646 - DNA, 80 bp, synthetic construct
  source 1..80: mol_type = other DNA
agaggggctcctcacctcccagcaggggcggccgggcagaggcgcccctcacctcccggacggggcggctggccgggcag

SEQ ID NO: 54647 - DNA, 80 bp, synthetic construct
  source 1..80: mol_type = other DNA
ggggcggctggccgggcgggggggctgacccccccccacctccctcccggacggggcggctggccgggcggggggctgac

SEQ ID NO: 54648 - DNA, 80 bp, synthetic construct
  source 1..80: mol_type = other DNA
gccgggcggggggctgacccccccacctccctcccggacggggcggctggccgggcgggaggctgacccccccacctccc

SEQ ID NO: 54649 - DNA, 80 bp, synthetic construct; identical to SEQ ID NO: 14355
  source 1..80: mol_type = other DNA

SEQ ID NO: 54650 - DNA, 80 bp, synthetic construct
  source 1..80: mol_type = other DNA
ggcagaggggctcctcacttcccagtaggggcggccaggcagaggtgcccctcacctcccggacggggcggctggccggg

SEQ ID NO: 54651 - DNA, 80 bp, synthetic construct; identical to SEQ ID NO: 14356
  source 1..80: mol_type = other DNA

SEQ ID NO: 54652 - DNA, 80 bp, synthetic construct
  source 1..80: mol_type = other DNA
ccgggcggaggggctcctcacttctcagactgggtggttgccaggcagagggtctcctcacttctcagacggggcggccg

SEQ ID NO: 54653 - DNA, 80 bp, synthetic construct
  source 1..80: mol_type = other DNA
gaggctgcaatctcggcactttgggaggccaaggcaggcggctgggaggtgtaggttgtagtgagccgagatcacaccac

SEQ ID NO: 54654 - DNA, 80 bp, synthetic construct
  source 1..80: mol_type = other DNA
gtggcggcgcgtgcctgcaatcgcaggcatttggcagactgaggcaggagaatcaggcagggcggttgcagtgagccgag

SEQ ID NO: 54655 - DNA, 80 bp, synthetic construct; identical to SEQ ID NO: 14357
  source 1..80: mol_type = other DNA

SEQ ID NO: 54656 - DNA, 80 bp, synthetic construct
  source 1..80: mol_type = other DNA
aaaaaattaatgattccttttgtcatgacatctcttcctaccctgtgtgcctgtcaaacaaagcaactctcagtatcata

SEQ ID NO: 54657 - DNA, 80 bp, synthetic construct
  source 1..80: mol_type = other DNA
caaacaataccctgtcagtatccacagttcagaattttggatttgactttaaggaggtgtctagtcaattgttagaataa

SEQ ID NO: 54658 - DNA, 80 bp, synthetic construct
  source 1..80: mol_type = other DNA
taaagctatgaaaaacaaaaaagcataagaagaatcagttctaaaagcaactgcttctgccatcgaggcaaaatacatag

SEQ ID NO: 54659 - DNA, 80 bp, synthetic construct
  source 1..80: mol_type = other DNA
caagtagctgggactacaggtgcacaccaccatgcccggctaattttttgtatttttagtggagatggggtttcaccatg

SEQ ID NO: 54660 - DNA, 80 bp, synthetic construct; identical to SEQ ID NO: 14358
  source 1..80: mol_type = other DNA

SEQ ID NO: 54661 - DNA, 80 bp, synthetic construct
  source 1..80: mol_type = other DNA
ctttacaccatcagaaaccaatttgtgttcccatatgggcaattgattggagtgtttatctagatagactctagacctaa

SEQ ID NO: 54662 - DNA, 80 bp, synthetic construct
  source 1..80: mol_type = other DNA
gttggttgttttgctcttgagttgtatgagttccttatacatttttgaaattagccccttatcaaatatatggtttgcaa

SEQ ID NO: 54663 - DNA, 80 bp, synthetic construct
  source 1..80: mol_type = other DNA
ctcatagaagcagcgaatacaatagtatagttaacaagagttgggggctgggggaaatggagagttgtcattaaaagggt

SEQ ID NO: 54664 - DNA, 80 bp, synthetic construct; identical to SEQ ID NO: 14359
  source 1..80: mol_type = other DNA

SEQ ID NO: 54665 - DNA, 80 bp, synthetic construct
  source 1..80: mol_type = other DNA
atggaaccacacaaaaagcctgaatagctaagacaatcttgagcaaaaagagcaaaactggagacattacaccacttgac

SEQ ID NO: 54666 - DNA, 80 bp, synthetic construct
  source 1..80: mol_type = other DNA
aaatacaaaaattagctgggcatggtggcaggtgcctgtaactccagctactcaggaggataaggtagagaactgcttga

SEQ ID NO: 54667 - DNA, 80 bp, synthetic construct
  source 1..80: mol_type = other DNA
actggcataacagtagacacatcaacggatgaaacagaatacagagcccagaaatgaatctacttatttatgaccaagtt

SEQ ID NO: 54668 - DNA, 80 bp, synthetic construct; identical to SEQ ID NO: 14360
  source 1..80: mol_type = other DNA

SEQ ID NO: 54669 - DNA, 80 bp, synthetic construct
  source 1..80: mol_type = other DNA
tccaaaatatattaggaactctcaatagcaaaaaaataaaaataaaaaataagatttaaaaataagcaaagaacatgaat

SEQ ID NO: 54670 - DNA, 80 bp, synthetic construct
  source 1..80: mol_type = other DNA
agtgaaacaccgtctgtacaaaaaatgcaaaaattagctgggcatggtggcacacgcatgtagtcccagctacttgggag

SEQ ID NO: 54671 - DNA, 80 bp, synthetic construct
  source 1..80: mol_type = other DNA
acaacgagatatcacctcacaccggaaagaatggttcttattgaaagggtaaaagataagtgttggtgaggatgtggaga

SEQ ID NO: 54672 - DNA, 80 bp, synthetic construct; identical to SEQ ID NO: 14361
  source 1..80: mol_type = other DNA

SEQ ID NO: 54673 - DNA, 80 bp, synthetic construct
  source 1..80: mol_type = other DNA
agttcttgaaaaaattaaaagtagaactactatatgactcagcaatcccacttctaggtgtatggactaaggacttaaaa

SEQ ID NO: 54674 - DNA, 80 bp, synthetic construct
  source 1..80: mol_type = other DNA
ggctgctctgggctgggtgcggtggctcacgcctgtgatcccagcactttgggaggccgaggcgggcggatcacgaggtc

SEQ ID NO: 54675 - DNA, 80 bp, synthetic construct
  source 1..80: mol_type = other DNA
aaaatagtgccactgcactccagcccaggcgacagtgagagactccatctcaaaaaaaaaaacaaaaaataaacgctgtt

SEQ ID NO: 54676 - DNA, 80 bp, synthetic construct; identical to SEQ ID NO: 14362
  source 1..80: mol_type = other DNA

SEQ ID NO: 54677 - DNA, 80 bp, synthetic construct
  source 1..80: mol_type = other DNA
tatatttatgggagtatcaggataaatcttcaaataccttctagagatatagttgaggtgagatatgtactgaaagcaaa

SEQ ID NO: 54678 - DNA, 80 bp, synthetic construct
  source 1..80: mol_type = other DNA
tgtgaccagagaagcgggtgtaaaaagtagggctaccctgacatttattcaccaatatccatgaatacataaatatgtat

SEQ ID NO: 54679 - DNA, 80 bp, synthetic construct
  source 1..80: mol_type = other DNA
acagaaaagggaaatgggaaggaaacatttctgtaagtgcaagtgttggggagaaggagtaggagctggggggaagctga

SEQ ID NO: 54680 - DNA, 80 bp, synthetic construct
  source 1..80: mol_type = other DNA
gacagaaagcaaaataatagctcagcagccgcattgaatgggaacagtgaatagtgtgaaaataatgagaaaatattggg

SEQ ID NO: 54681 - DNA, 80 bp, synthetic construct; identical to SEQ ID NO: 14363
  source 1..80: mol_type = other DNA

SEQ ID NO: 54682 - DNA, 80 bp, synthetic construct
  source 1..80: mol_type = other DNA
acatgatttgggagccgtttaaccccttgttcactagtcagttcatcctcttgttttctacaaaaatgtagttatctgct

SEQ ID NO: 54683 - DNA, 80 bp, synthetic construct
  source 1..80: mol_type = other DNA
ttgccgcactttaaattcggtaaattttaactgaggatccaccatatgcatgtgcacatacacatgcaatctaggtgggg

SEQ ID NO: 54684 - DNA, 80 bp, synthetic construct
  source 1..80: mol_type = other DNA
gaattagatcctacttttaagtagatcctacacagacaaaagagcacattgtaatgacagacatataaaattcatataaa

SEQ ID NO: 54685 - DNA, 80 bp, synthetic construct
  source 1..80: mol_type = other DNA
ctcgggaggctgaggcaggagaatgtcgtgaacccgggaggcggaggttgcagagatcacgccactgcactccagcctgg

SEQ ID NO: 54686 - DNA, 80 bp, synthetic construct; identical to SEQ ID NO: 14364
  source 1..80: mol_type = other DNA

SEQ ID NO: 54687 - DNA, 80 bp, synthetic construct
  source 1..80: mol_type = other DNA
cagagctgaagtacactaagaaaggcattgaaaatttggcaaagatgttacatcttttagaaagatgtggatggatgcag

SEQ ID NO: 54688 - DNA, 80 bp, synthetic construct
  source 1..80: mol_type = other DNA
gaacagaaggtcttttagaaggaaaatattttctttccttttgtaggtaacacccaaagggatcagtatgcctatccgtc

SEQ ID NO: 54689 - DNA, 80 bp, synthetic construct
  source 1..80: mol_type = other DNA
agactgaaaccacatcacttatctccagcagatacagctgaccagaaggtcttatataaagtcttggagaaaagttgcag

SEQ ID NO: 54690 - DNA, 80 bp, synthetic construct; identical to SEQ ID NO: 14365
  source 1..80: mol_type = other DNA

SEQ ID NO: 54691 - DNA, 80 bp, synthetic construct
  source 1..80: mol_type = other DNA
tcatttaattctcatcataaccctgcagtggatgtatgtatcaaactgtgttttcagttaactgctacattcccaacaca

SEQ ID NO: 54692 - DNA, 80 bp, synthetic construct
  source 1..80: mol_type = other DNA
ttcgagaccagcctgaccaatatggtgaaaccccgtctctactaaaaatacaaaaattagctgggtgtggtggcgggcac

SEQ ID NO: 54693 - DNA, 80 bp, synthetic construct
  source 1..80: mol_type = other DNA
tttgtttattactgggatatgattaggaaaccaaatgtgttacatttttaacattgtatagtgacatagaacacacatat

SEQ ID NO: 54694 - DNA, 80 bp, synthetic construct
  source 1..80: mol_type = other DNA
cctcctgtccacattactctcccttcccaccaagacaactcaccatcagactttcatagcaatcccttcattgcttctca

SEQ ID NO: 54695 - DNA, 80 bp, synthetic construct; identical to SEQ ID NO: 14366
  source 1..80: mol_type = other DNA

SEQ ID NO: 54696 - DNA, 80 bp, synthetic construct
  source 1..80: mol_type = other DNA
aaaaaatgttcatcagtggtcacaaatataatgtatctaaaatagggacagtaagaaattactgggcataactagaaggt

SEQ ID NO: 54697 - DNA, 80 bp, synthetic construct
  source 1..80: mol_type = other DNA
gggaaaagggcaggaaaatcggaaatatcggcacacatgttaatgaatgtttgttgtagttaaattgaagttgaaggaga

SEQ ID NO: 54698 - DNA, 80 bp, synthetic construct
  source 1..80: mol_type = other DNA
atatgttaaggcaggtttcacctcctttctgactttagaataagttggtagagggcttcacagagtgaaaaatacccatc

SEQ ID NO: 54699 - DNA, 80 bp, synthetic construct; identical to SEQ ID NO: 14367
  source 1..80: mol_type = other DNA

SEQ ID NO: 54700 - DNA, 80 bp, synthetic construct
  source 1..80: mol_type = other DNA
aatcctagcactttagaaggccaaggcaggtggattgcctgagctcaggagttcaagaccaccctgggcaacatggtgaa

SEQ ID NO: 54701 - DNA, 80 bp, synthetic construct
  source 1..80: mol_type = other DNA
tgaactgagatcacgccactgccctccagcctgggcaacagagtgaggctatctctgaaaaaaaaaaaaaaaaaaaaaaa

SEQ ID NO: 54702 - DNA, 80 bp, synthetic construct
  source 1..80: mol_type = other DNA
aaaatttgaaaatacagttcatttgcagaagtaagacttgaagcagagaagaggaggaaatgatgccgaggaatagcagt

SEQ ID NO: 54703 - DNA, 80 bp, synthetic construct; identical to SEQ ID NO: 14368
  source 1..80: mol_type = other DNA

SEQ ID NO: 54704 - DNA, 80 bp, synthetic construct
  source 1..80: mol_type = other DNA
ttttttagacctcttttcgtctttcagagatagcatccaaagactgagttctcaaacccccagggtgattatctatcctg

SEQ ID NO: 54705 - DNA, 80 bp, synthetic construct
  source 1..80: mol_type = other DNA
tagtctggtttcgagaccctgtgaaaaggtggagtaggggcaaattattagctatgtgatgtgagaaagatataatatct

SEQ ID NO: 54706 - DNA, 80 bp, synthetic construct
  source 1..80: mol_type = other DNA
gaaaattgctgtaatgctggatctcatcactagtagaaaactaaaatctgtggtagggacaaaattgaaaggaaaggaga

SEQ ID NO: 54707 - DNA, 80 bp, synthetic construct; identical to SEQ ID NO: 14369
  source 1..80: mol_type = other DNA

SEQ ID NO: 54708 - DNA, 80 bp, synthetic construct
  source 1..80: mol_type = other DNA
aataagagcacaaatttgttggttttcaaacatgagccaaattgttaaaacagtttacacactggccgggcacggtggct

SEQ ID NO: 54709 - DNA, 80 bp, synthetic construct
  source 1..80: mol_type = other DNA
gaggctaaggcaggagaattgcttgaacccgggaggcagatgttgcagtgggctgagatctcgccactgcactccagcct

SEQ ID NO: 54710 - DNA, 80 bp, synthetic construct
  source 1..80: mol_type = other DNA
gtagagaaaatataatgaaacgatatgtaagggaaacgaaggatgaaagatgcaggcagggagaggagtactgtctgatg

SEQ ID NO: 54711 - DNA, 80 bp, synthetic construct; identical to SEQ ID NO: 14370
  source 1..80: mol_type = other DNA

SEQ ID NO: 54712 - DNA, 80 bp, synthetic construct
  source 1..80: mol_type = other DNA
cttgcactaggcatttcaagaaagaaaagcattcctggaaatccccaatcggtcacaggcatgtttctccaaccaatagg

SEQ ID NO: 54713 - DNA, 80 bp, synthetic construct
  source 1..80: mol_type = other DNA
accccatgtggagagacaagataccatattttgtagttgtgaagcagagtaaagactgagactcttagtacttagtattg

SEQ ID NO: 54714 - DNA, 80 bp, synthetic construct
  source 1..80: mol_type = other DNA
ccacctgctgattgtcataggacaatttgagggaaagtcacattatcatgtgctgattattttgctctagcaaagtagta

SEQ ID NO: 54715 - DNA, 80 bp, synthetic construct; identical to SEQ ID NO: 14371
  source 1..80: mol_type = other DNA

SEQ ID NO: 54716 - DNA, 80 bp, synthetic construct
  source 1..80: mol_type = other DNA
atgaggtcagaattctggcacccaacccacaccttggtcaagtaatttactcttttgagtgtctgtttcttcatcactaa

SEQ ID NO: 54717 - DNA, 80 bp, synthetic construct
  source 1..80: mol_type = other DNA
aatacagttcacactgtaaaccaaaaataaaatttaagcccttcaaccaactaaatgggctcttctgcttggccaaggac

SEQ ID NO: 54718 - DNA, 80 bp, synthetic construct
  source 1..80: mol_type = other DNA
taagacaccaacgcaacagatagcatgccctgaaagaaatcaaagtattttatcacaaaatataatttgacatattttga

SEQ ID NO: 54719 - DNA, 80 bp, synthetic construct
  source 1..80: mol_type = other DNA
gcccaggctggagtgcagtggcgcaatctcggctcactgcaacctctgccacctcctgggctctaaatgattctcctgcc

SEQ ID NO: 54720 - DNA, 80 bp, synthetic construct; identical to SEQ ID NO: 14372
  source 1..80: mol_type = other DNA

SEQ ID NO: 54721 - DNA, 80 bp, synthetic construct
  source 1..80: mol_type = other DNA
ccctacttcaagttgtctcctttctggaccaaaccaatgtacatcttatatgtattgattgatgtcttatgtctccctaa

SEQ ID NO: 54722 - DNA, 80 bp, synthetic construct
  source 1..80: mol_type = other DNA
ttagggacaccaatgcccaacacagtcaaaaatcttcatataacttttgactccctaaaaactaccaatagcctactgtt

SEQ ID NO: 54723 - DNA, 80 bp, synthetic construct
  source 1..80: mol_type = other DNA
atcgatactgtaagtttacatgacctggtttacaagacaaaccatgtgtctaaaatcatgaagaaccgcagctgcagacc

SEQ ID NO: 54724 - DNA, 80 bp, synthetic construct; identical to SEQ ID NO: 14373
  source 1..80: mol_type = other DNA

SEQ ID NO: 54725 - DNA, 80 bp, synthetic construct
  source 1..80: mol_type = other DNA
atgtctctccactgtgaagggcattatgtatggtctataagtgcataacttttcataagttttaattttttataacagat

SEQ ID NO: 54726 - DNA, 80 bp, synthetic construct
  source 1..80: mol_type = other DNA
tgtgggtttttgcaaactgtcatatatctcaaaaaaatttcaaatatatttattttaaaaaatcaaaccataagaggacc

SEQ ID NO: 54727 - DNA, 80 bp, synthetic construct
  source 1..80: mol_type = other DNA
acagtcctttgtggattctttttcaagtactccttagaggcaagataaaaacattatttgttgaaaccattttgggggta

SEQ ID NO: 54728 - DNA, 80 bp, synthetic construct
  source 1..80: mol_type = other DNA
gaactttccaactcacttcctgaaaaactggccacatagctacaattatttgtcacccccttggtaactccatgggaata

SEQ ID NO: 54729 - DNA, 80 bp, synthetic construct; identical to SEQ ID NO: 14374
  source 1..80: mol_type = other DNA

SEQ ID NO: 54730 - DNA, 80 bp, synthetic construct
  source 1..80: mol_type = other DNA
gggattggtcaatactttctcggtgaattctcaagtacaagagaatattttaactgcaacactgcctcattggtgtcaat

SEQ ID NO: 54731 - DNA, 80 bp, synthetic construct
  source 1..80: mol_type = other DNA
acactacttttcttataatactagtaacacctgcccaataaggaaagattggaagtctacaaaattaatagagacaaatt

SEQ ID NO: 54732 - DNA, 80 bp, synthetic construct
  source 1..80: mol_type = other DNA
ctgttcaagaaaatctctgaaaattggcaagaaaagcaagagtctgtggtgtttgaaccaagactataccctccctctct

SEQ ID NO: 54733 - DNA, 80 bp, synthetic construct; identical to SEQ ID NO: 14375
  source 1..80: mol_type = other DNA

SEQ ID NO: 54734 - DNA, 80 bp, synthetic construct
  source 1..80: mol_type = other DNA
tcactcagagagaagcttgccacagttacacccagctccagagccctgacttagagagtttgcctgggaggaaaggcaat

SEQ ID NO: 54735 - DNA, 80 bp, synthetic construct
  source 1..80: mol_type = other DNA
gtttaaacctaagggcactctcaattatagtagaggttgtggtgaaaagcagttgggagatttgtgcatctaatgcaggt

SEQ ID NO: 54736 - DNA, 80 bp, synthetic construct
  source 1..80: mol_type = other DNA
gccccagggcattattgaaaagagtggtaattaatggacttcagtggctgggttggtgagggaaagaatgaaaaagagtc

SEQ ID NO: 54737 - DNA, 80 bp, synthetic construct; identical to SEQ ID NO: 14376
  source 1..80: mol_type = other DNA

SEQ ID NO: 54738 - DNA, 80 bp, synthetic construct
  source 1..80: mol_type = other DNA
gagaaacagagacaaaaagatatgtatgatgattgactcgctcaattatggatgccaagaagtgccacaatatgccatct

SEQ ID NO: 54739 - DNA, 80 bp, synthetic construct
  source 1..80: mol_type = other DNA
ggtgtccaggggtagaagtagatgtcccagctcaaagagaaagagaattcacccttcctccacctttttgttctatttgg

SEQ ID NO: 54740 - DNA, 80 bp, synthetic construct
  source 1..80: mol_type = other DNA
tgacacataacattatccattacattcatagacctaaaggaaaggatggctaaagaagtgaaggaaggtgtgatggcaat

SEQ ID NO: 54741 - DNA, 80 bp, synthetic construct; identical to SEQ ID NO: 14377
  source 1..80: mol_type = other DNA

SEQ ID NO: 54742 - DNA, 80 bp, synthetic construct
  source 1..80: mol_type = other DNA
ataaagtcctggtaagatcctgtctcttttgctatgcctctacaaggtcataaagtaaataaaaactaggttgcaattcc

SEQ ID NO: 54743 - DNA, 80 bp, synthetic construct
  source 1..80: mol_type = other DNA
gtggaagctttgtactttcactctgctcaataaagcctacagctttttctctctattggtccgtgtctctatcactcgcg

SEQ ID NO: 54744 - DNA, 80 bp, synthetic construct
  source 1..80: mol_type = other DNA
gaggctaggaaatccaagatcgaagaacaaacagattcagtgtttggcaagggcttactgtctgtttcccagacagtgcc

SEQ ID NO: 54745 - DNA, 80 bp, synthetic construct
  source 1..80: mol_type = other DNA
taactcgtcatttaacattaggtatatctccaaatgctatccctcccccctcaccccaccccacaacagtcccctgtgtg

SEQ ID NO: 54746 - DNA, 80 bp, synthetic construct; identical to SEQ ID NO: 14378
  source 1..80: mol_type = other DNA

SEQ ID NO: 54747 - DNA, 80 bp, synthetic construct
  source 1..80: mol_type = other DNA
gtacaataattgaaataaaaattcactagagaggcttaaccataggtttgtcctagcagaagaaagaaatgtagaataaa

SEQ ID NO: 54748 - DNA, 80 bp, synthetic construct
  source 1..80: mol_type = other DNA
ctaagaaaccacctactacttaacattataaataggtgcttcttttgtgttccattagaccataagccccttaaatttaa

SEQ ID NO: 54749 - DNA, 80 bp, synthetic construct
  source 1..80: mol_type = other DNA
acacttacctccaacacatttatttgttcctggtctcgctcttcttcagtcctaagttacaactaacaaatgaattatat

SEQ ID NO: 54750 - DNA, 80 bp, synthetic construct
  source 1..80: mol_type = other DNA
ggcgggcgcctgtagtcccagctactcgggaggctgaggcaggataatggcatgaacctgggaggtggagcttgcagtga

SEQ ID NO: 54751 - DNA, 80 bp, synthetic construct; identical to SEQ ID NO: 14379
  source 1..80: mol_type = other DNA

SEQ ID NO: 54752 - DNA, 80 bp, synthetic construct
  source 1..80: mol_type = other DNA
ggctttggaattaggcagaacttagtttaaattttactctgctgtatcctggatgtctgactttgggcagttttaatggt

SEQ ID NO: 54753 - DNA, 80 bp, synthetic construct
  source 1..80: mol_type = other DNA
aggtctgttacatcagggttttacactgaactaaatgaaattgatcaagattctttttgatcaaaaacagatgattgttg

SEQ ID NO: 54754 - DNA, 80 bp, synthetic construct
  source 1..80: mol_type = other DNA
tgtctctactaaaattacaaaaattagccgggcatgatggtgtgagcctgtaatcccagctactcaggtgggtgagacac

SEQ ID NO: 54755 - DNA, 80 bp, synthetic construct; identical to SEQ ID NO: 14380
  source 1..80: mol_type = other DNA

SEQ ID NO: 54756 - DNA, 80 bp, synthetic construct
  source 1..80: mol_type = other DNA
tcatcagacttaagtataaataggagagttgtattgatgcatggataaacctatagacaaacgaacaaaaacagtgggcc

SEQ ID NO: 54757 - DNA, 80 bp, synthetic construct
  source 1..80: mol_type = other DNA
attcaggctaatcaaatgtgaacaggaaccacagtgaactatcaccttatcccagttggaatgcctactatcaaaaaggc

SEQ ID NO: 54758 - DNA, 80 bp, synthetic construct
  source 1..80: mol_type = other DNA
aatagagctatcataccatctagcaatcccattactgaatatttagccaaaggaaaagtaatttttaaatttttaaaata

SEQ ID NO: 54759 - DNA, 80 bp, synthetic construct
  source 1..80: mol_type = other DNA
aatcaaaatacactttaaaaacatgacacaaattggaagaagttatttttaatacatataatataggaaaattaagttgt

SEQ ID NO: 54760 - DNA, 80 bp, synthetic construct; identical to SEQ ID NO: 14381
  source 1..80: mol_type = other DNA

SEQ ID NO: 54761 - DNA, 80 bp, synthetic construct
  source 1..80: mol_type = other DNA
ttctagtcttagacactggttctaaagaaacattaggtatgtggacaaggaagcatgcacagggatgttaacagaggtgt

SEQ ID NO: 54762 - DNA, 80 bp, synthetic construct
  source 1..80: mol_type = other DNA
attcagatcaaatgctcaaagtggagtaagatatcattgtctttcacagaatcacttaatagactgcagcagatctccct

SEQ ID NO: 54763 - DNA, 80 bp, synthetic construct
  source 1..80: mol_type = other DNA
gagagtgttcttggcttcactcgggaaagattccaaggatgagacagtggtgttagacagcaacttttattgaaccaagc

SEQ ID NO: 54764 - DNA, 80 bp, synthetic construct; identical to SEQ ID NO: 14382
  source 1..80: mol_type = other DNA

SEQ ID NO: 54765 - DNA, 80 bp, synthetic construct
  source 1..80: mol_type = other DNA
ccccagttgataagaagatgcatgagtaaaggaggaaattgagagatgcttcctttcggtgtccaagtgtcaaaaaggat

SEQ ID NO: 54766 - DNA, 80 bp, synthetic construct
  source 1..80: mol_type = other DNA
aaagtcttaatattttgtgtatctttctcagcactagactagaacatatatgccaatgggtagtgatacacaactgtcac

SEQ ID NO: 54767 - DNA, 80 bp, synthetic construct
  source 1..80: mol_type = other DNA
taaattctaacatacaaagcaaattagcactgatttatcagatttaccattgggtggggtgaggaggaggaggatgctgg

SEQ ID NO: 54768 - DNA, 80 bp, synthetic construct; identical to SEQ ID NO: 14383
  source 1..80: mol_type = other DNA

SEQ ID NO: 54769 - DNA, 80 bp, synthetic construct
  source 1..80: mol_type = other DNA
acaatgtagtttctaatatgttgaattcatactccagaaagtgtcctgtagaataatgtcttactgaaaacggccatcac

SEQ ID NO: 54770 - DNA, 80 bp, synthetic construct
  source 1..80: mol_type = other DNA
cttgtaggaaaagaagagctgtttggtcacaggatgtggttattagaatagggttgtggttgaaggggaaggatgatgac

SEQ ID NO: 54771 - DNA, 80 bp, synthetic construct
  source 1..80: mol_type = other DNA
cattagcattaggaataatagaaaatatcaaagaataagttttgtaagaaatacatagactcaacagaaagtaaaaaatg

SEQ ID NO: 54772 - DNA, 80 bp, synthetic construct; identical to SEQ ID NO: 14384
  source 1..80: mol_type = other DNA

SEQ ID NO: 54773 - DNA, 80 bp, synthetic construct
  source 1..80: mol_type = other DNA
cccacttcctcctcagcaaccacaatctgattttagacaggccttgttttgcatctatggtagtgcaatttctacatcaa

SEQ ID NO: 54774 - DNA, 80 bp, synthetic construct
  source 1..80: mol_type = other DNA
taattttcaaagtgtttttgttgttttacctatggagaaaagattaatagcaatttggtttgttttacaaagggactacc

SEQ ID NO: 54775 - DNA, 80 bp, synthetic construct
  source 1..80: mol_type = other DNA
tttacatataacagggactaaaaaatggtcatgagttcaaagaaatcagatgaaatttggtaggaatttggggctaatgt

SEQ ID NO: 54776 - DNA, 80 bp, synthetic construct; identical to SEQ ID NO: 14385
  source 1..80: mol_type = other DNA

SEQ ID NO: 54777 - DNA, 80 bp, synthetic construct
  source 1..80: mol_type = other DNA
aaataaatactatttcaagtgtgtggtgatgtttttatagccattaaagataagattttatgaaactgtttagtgatgta

SEQ ID NO: 54778 - DNA, 80 bp, synthetic construct
  source 1..80: mol_type = other DNA
tagaagaacgactacatttttctcctcccaacagtcttaatagggcctccaggtctaaggtgagtggccttgaaaaatct

SEQ ID NO: 54779 - DNA, 80 bp, synthetic construct
  source 1..80: mol_type = other DNA
ttttcaatccttttacataactttactcatctctacctctcccttccctccaaagagttcttttttatccgctgtcctca

SEQ ID NO: 54780 - DNA, 80 bp, synthetic construct; identical to SEQ ID NO: 14386
  source 1..80: mol_type = other DNA

SEQ ID NO: 54781 - DNA, 80 bp, synthetic construct
  source 1..80: mol_type = other DNA
cagtaaaatttcaggttcttcagctgaccatgaagacttcaaagtgcattcactatttaaatcacctgtagatgaattat

SEQ ID NO: 54782 - DNA, 80 bp, synthetic construct
  source 1..80: mol_type = other DNA
tcagtcccccgggctggagtgcagtggcgtgatctcggctcactgcaagctctgcctcctgggttcacgtcattctcctg

SEQ ID NO: 54783 - DNA, 80 bp, synthetic construct
  source 1..80: mol_type = other DNA
gggattacaggcgtgagccaccgcgcccggcctattacagcattttatagaagagactgagcatccacagattttgatat

SEQ ID NO: 54784 - DNA, 80 bp, synthetic construct; identical to SEQ ID NO: 14387
  source 1..80: mol_type = other DNA

SEQ ID NO: 54785 - DNA, 80 bp, synthetic construct
  source 1..80: mol_type = other DNA
cttgaattctggctccatttcttactattggtatagctttagtcaggtatccaacccttccatgctacaatttcctaatt

SEQ ID NO: 54786 - DNA, 80 bp, synthetic construct
  source 1..80: mol_type = other DNA
ttattatcatcatcatgactgggaggtaacatggcaatttgtcgacattttcttaccagcctggctgataaacatccagt

SEQ ID NO: 54787 - DNA, 80 bp, synthetic construct
  source 1..80: mol_type = other DNA
ggaaacaaccaagtccattccttcactttaattctgatttttttcccacaatgtacacatcccaggatttgtggctgact

SEQ ID NO: 54788 - DNA, 80 bp, synthetic construct; identical to SEQ ID NO: 14388
  source 1..80: mol_type = other DNA

SEQ ID NO: 54789 - DNA, 80 bp, synthetic construct
  source 1..80: mol_type = other DNA
gctcactgcaacctccacctcccaggttcaagcaattcttctgcttcagcctcccaagtagctaggattacaggcatgtg

SEQ ID NO: 54790 - DNA, 80 bp, synthetic construct
  source 1..80: mol_type = other DNA
taatctgactgttgaacccttcacttctctggttagttaattttccagacagagggcgctgaaaggacacccatgtatca

SEQ ID NO: 54791 - DNA, 80 bp, synthetic construct
  source 1..80: mol_type = other DNA
aagcagcatcatctgtctctggcagactaagccatgaagactgtaagaaaaaatatttagtgatggaggaaggaaaaaag

SEQ ID NO: 54792 - DNA, 80 bp, synthetic construct; identical to SEQ ID NO: 14389
  source 1..80: mol_type = other DNA

SEQ ID NO: 54793 - DNA, 80 bp, synthetic construct
  source 1..80: mol_type = other DNA
atatgcacttaagattgttatgtctctttagagaaataaccctttatcattaagtgatgtctgtctttatccctattaac

SEQ ID NO: 54794 - DNA, 80 bp, synthetic construct
  source 1..80: mol_type = other DNA
atttttattcaatctgttcttctctatcatttaattggtctgtctggaccaattatatttaatgtacttattaatatggt

SEQ ID NO: 54795 - DNA, 80 bp, synthetic construct
  source 1..80: mol_type = other DNA
tattcattgtgcaattgttgtcatataatttctttctcatattccataaacacacaatacattgctactatttttatttt

SEQ ID NO: 54796 - DNA, 80 bp, synthetic construct; identical to SEQ ID NO: 14390
  source 1..80: mol_type = other DNA

SEQ ID NO: 54797 - DNA, 80 bp, synthetic construct
  source 1..80: mol_type = other DNA
tcctcccatcctccactcttcaataggtcctagtgtgtgtggttcccctctatgtgtccatgtatgtgttattataattt

SEQ ID NO: 54798 - DNA, 80 bp, synthetic construct
  source 1..80: mol_type = other DNA
tggagtgcagtggcacgatctcggctcactgcaagctccgcctcctgggttcacaccattctcctgcctcagtctcccga

SEQ ID NO: 54799 - DNA, 80 bp, synthetic construct
  source 1..80: mol_type = other DNA
tctttttaatggctgcgtagtattccatggtgtatatgtaccaaattttctttatccagtctatcattgatgggtattta

SEQ ID NO: 54800 - DNA, 80 bp, synthetic construct; identical to SEQ ID NO: 14391
  source 1..80: mol_type = other DNA

SEQ ID NO: 54801 - DNA, 80 bp, synthetic construct
  source 1..80: mol_type = other DNA
catgccctttgcccacttttttatggagttgttcgtttttttcttgtacatttgtttaagtttcttatagatgctggata

SEQ ID NO: 54802 - DNA, 80 bp, synthetic construct
  source 1..80: mol_type = other DNA
ctatgtcctgagtagtattgcctaagttgtcttccagggtttttatagttttgcattttacatttaagtctttaatccat

SEQ ID NO: 54803 - DNA, 80 bp, synthetic construct
  source 1..80: mol_type = other DNA
gtcttatttctggtgggttctctattctgctccattgctgtatgtgtctgttcttgtaccagtaccatgctgttctggtt

SEQ ID NO: 54804 - DNA, 80 bp, synthetic construct; identical to SEQ ID NO: 14392
  source 1..80: mol_type = other DNA

SEQ ID NO: 54805 - DNA, 80 bp, synthetic construct
  source 1..80: mol_type = other DNA
taaattaaaagatctatacaaagaatgtttacaatatgtacattaggactggggagttcctgggaggagaatcaatcact

SEQ ID NO: 54806 - DNA, 80 bp, synthetic construct
  source 1..80: mol_type = other DNA
cttcatgaaataacctcttaggtttagctgtagaatactctggagctatggagaaggtagatctggacatggaggtaatt

SEQ ID NO: 54807 - DNA, 80 bp, synthetic construct
  source 1..80: mol_type = other DNA
gcagtggcacgatttcggctcactgcaagctctgtctcccaggtttacaccattctcctgcctcagcctcttgagtagct

SEQ ID NO: 54808 - DNA, 80 bp, synthetic construct
  source 1..80: mol_type = other DNA
gcgcctggcctcctcatattattttttattgtgcagtttattcaagtgagttatttaaaacaactagttcacacacatag

SEQ ID NO: 54809 - DNA, 80 bp, synthetic construct; identical to SEQ ID NO: 14393
  source 1..80: mol_type = other DNA

SEQ ID NO: 54810 - DNA, 80 bp, synthetic construct
  source 1..80: mol_type = other DNA
agataagatcttgactggtaggtgagtgggtggaatttatttcaaatatgggggctctccaatccttgcacaccaaattc

SEQ ID NO: 54811 - DNA, 80 bp, synthetic construct
  source 1..80: mol_type = other DNA
gatgttgtgagttttaagtttcagctcaagacacctactgtttctatcttgcacaggagagctttccagcacctgtgata

SEQ ID NO: 54812 - DNA, 80 bp, synthetic construct
  source 1..80: mol_type = other DNA
ccagtacataaaaaccactcaggtgggttgagcacaatttcctgtcttacagaatcatgaggagacactaaacaattatt

SEQ ID NO: 54813 - DNA, 80 bp, synthetic construct; identical to SEQ ID NO: 14394
  source 1..80: mol_type = other DNA

SEQ ID NO: 54814 - DNA, 80 bp, synthetic construct
  source 1..80: mol_type = other DNA
tagaaaataaccttaaggctcaggagttttgagtagcttgcccaaggtgatgcagctgataaaatgaaaagcagcatgga

SEQ ID NO: 54815 - DNA, 80 bp, synthetic construct
  source 1..80: mol_type = other DNA
tttgctactctagactctcttattattgtgaagcagctttaactactgcaagacagaagtcttggccttcagagtaaaac

SEQ ID NO: 54816 - DNA, 80 bp, synthetic construct
  source 1..80: mol_type = other DNA
gtcaattataatggcacatcccattgttattttagtcatggaatcaatggcatgtcaataagtgctttctgagaaaattg

SEQ ID NO: 54817 - DNA, 80 bp, synthetic construct; identical to SEQ ID NO: 14395
  source 1..80: mol_type = other DNA

SEQ ID NO: 54818 - DNA, 80 bp, synthetic construct
  source 1..80: mol_type = other DNA
tggttaacacagtgaaaccccatctctactaaaaatacaaaaaattagccgggcgtggtggcaggtgcctgtagtcccag

SEQ ID NO: 54819 - DNA, 80 bp, synthetic construct
  source 1..80: mol_type = other DNA
ggcaccctcaacttcccatccaagatacaattctaatcctacatttaacaccctaacttcttaactggagttgagttatt

SEQ ID NO: 54820 - DNA, 80 bp, synthetic construct
  source 1..80: mol_type = other DNA
tgagtggcaaagggagcacatctcaaaggggacctcaaaaaccctcttcatccacaatggcaggagctagaaagaataaa

SEQ ID NO: 54821 - DNA, 80 bp, synthetic construct; identical to SEQ ID NO: 14396
  source 1..80: mol_type = other DNA

SEQ ID NO: 54822 - DNA, 80 bp, synthetic construct
  source 1..80: mol_type = other DNA
atgcagcccctcagtaagagattgttggaaccaaagaagtagaaccacgagaatacatatattaagagaatgatgcaagg

SEQ ID NO: 54823 - DNA, 80 bp, synthetic construct
  source 1..80: mol_type = other DNA
tctgtttcctcagagaaacctcagctctgctcttaaggcttttcaacagcttagattaagctcacccagttttcctagga

SEQ ID NO: 54824 - DNA, 80 bp, synthetic construct
  source 1..80: mol_type = other DNA
aggtgattttggggaggatttaagaaagagggattttgcttttaattggattctgacagaaagtggagggttggggtggc

SEQ ID NO: 54825 - DNA, 80 bp, synthetic construct; identical to SEQ ID NO: 14397
  source 1..80: mol_type = other DNA

SEQ ID NO: 54826 - DNA, 80 bp, synthetic construct
  source 1..80: mol_type = other DNA
aggtaaaacatagtgctgagaatctcagaaggccatttatcaaggacagagtgattctaaatagaagctccattaactta

SEQ ID NO: 54827 - DNA, 80 bp, synthetic construct
  source 1..80: mol_type = other DNA
aaccatttttctaaggcagtgcaattcttattctaccctcaacttttgacttcatattcttaattaaaaaaaaaattctt

SEQ ID NO: 54828 - DNA, 80 bp, synthetic construct
  source 1..80: mol_type = other DNA
tataacccctttttattgccctggccaaaaccacctggagcttttgagcacttgagaagaacttacccagctggatttat

SEQ ID NO: 54829 - DNA, 80 bp, synthetic construct; identical to SEQ ID NO: 14398
  source 1..80: mol_type = other DNA

SEQ ID NO: 54830 - DNA, 80 bp, synthetic construct
  source 1..80: mol_type = other DNA
tactaaaaatacaaaaattagctgggcgtggtggcaggtgcctgcagtcccagctacttgggagggtgagggaggagaat

SEQ ID NO: 54831 - DNA, 80 bp, synthetic construct
  source 1..80: mol_type = other DNA
cacaccagagaagattccaatttaatgtcctccctttattcatagaacaattcctcaagtccactctgagtagaggctgc

SEQ ID NO: 54832 - DNA, 80 bp, synthetic construct
  source 1..80: mol_type = other DNA
aattactctacagctcagaacaccaactgctgaggctgccttgggaagaggatgatcctaaacaaagctctgctgctggg

SEQ ID NO: 54833 - DNA, 80 bp, synthetic construct; identical to SEQ ID NO: 14399
  source 1..80: mol_type = other DNA

SEQ ID NO: 54834 - DNA, 80 bp, synthetic construct
  source 1..80: mol_type = other DNA
aatttccctgaacaacttttgaagcttttcggatgtctccggtggtagatcttggggtcattccatcaattatgtactct

SEQ ID NO: 54835 - DNA, 80 bp, synthetic construct
  source 1..80: mol_type = other DNA
ttttaccacatggtcctcacttactctcagctgcctcatatgtgtcacctcacaagtaatcaaataaaatgggcatgtgg

SEQ ID NO: 54836 - DNA, 80 bp, synthetic construct
  source 1..80: mol_type = other DNA
attatcaacccaaattacctgttcttcacctcatctaataaagtcctataaaaagaaaagtgggccagacaaggtggctc

SEQ ID NO: 54837 - DNA, 80 bp, synthetic construct; identical to SEQ ID NO: 14400
  source 1..80: mol_type = other DNA

SEQ ID NO: 54838 - DNA, 80 bp, synthetic construct
  source 1..80: mol_type = other DNA
aaggaagcacagattaattatttggtctcttactctcctctgcctttgtcgtccatctctttccacctctcttcatgcat

SEQ ID NO: 54839 - DNA, 80 bp, synthetic construct
  source 1..80: mol_type = other DNA
gaaggtactttaaactttcacaactttattaaccgtggctgctcccattatgattttgttcggcagtggaagtttcacct

SEQ ID NO: 54840 - DNA, 80 bp, synthetic construct
  source 1..80: mol_type = other DNA
aaattagaaaaataatggaatattagagcctaagaaaatgttttaacttttaattcagcctagattatattgtctttata

SEQ ID NO: 54841 - DNA, 80 bp, synthetic construct; identical to SEQ ID NO: 14401
  source 1..80: mol_type = other DNA

SEQ ID NO: 54842 - DNA, 80 bp, synthetic construct
  source 1..80: mol_type = other DNA
gtgacgtcctctagcaaaatttggcacccaagacaagtaccagaagaaaagaaagactgcatgtattccacatatattca

SEQ ID NO: 54843 - DNA, 80 bp, synthetic construct
  source 1..80: mol_type = other DNA
cataatgtggtcaaaaacatgttgatgagaggactcagctacaaagttgttaacttaagcagaaacctcaaggatggatt

SEQ ID NO: 54844 - DNA, 80 bp, synthetic construct
  source 1..80: mol_type = other DNA
ttgaaggatgttggactgtaaggctgtcgatatcctcctcagagaacttactacagtacattgtatctgttcccttacct

SEQ ID NO: 54845 - DNA, 80 bp, synthetic construct; identical to SEQ ID NO: 14402
  source 1..80: mol_type = other DNA

SEQ ID NO: 54846 - DNA, 80 bp, synthetic construct
  source 1..80: mol_type = other DNA
gcttccacttttcatttcagaagaaatcagttgctctcctctaaggaccattactattaacaaaacagagaccttagaag

SEQ ID NO: 54847 - DNA, 80 bp, synthetic construct
  source 1..80: mol_type = other DNA
tcctattctgagccagtcctgagaggaaaggaagtataatcaatttgttattaaccaatgaaagaattaagtgaaagata

SEQ ID NO: 54848 - DNA, 80 bp, synthetic construct
  source 1..80: mol_type = other DNA
ctgcccttgtgtagcgcacactagagtgggaaagaaagtgcacttttaactggacaactaccaacatgaagaggggagga

SEQ ID NO: 54849 - DNA, 80 bp, synthetic construct; identical to SEQ ID NO: 14403
  source 1..80: mol_type = other DNA

SEQ ID NO: 54850 - DNA, 80 bp, synthetic construct
  source 1..80: mol_type = other DNA
caccattctgcctctctttacttaagttatccctccataccagggttcattattttcttcccaagaggtccccagatctt

SEQ ID NO: 54851 - DNA, 80 bp, synthetic construct
  source 1..80: mol_type = other DNA
aataaagcagaggcaatgtgtcgttgctcccaagcagaaggtaaataagacctctttgactatcaggtggtgaaatgctg

SEQ ID NO: 54852 - DNA, 80 bp, synthetic construct
  source 1..80: mol_type = other DNA
caacatctttcctcctgtggtcaacatcacatggctgagcaatgggcagtcagtcacagaaggtgtttctgagaccagct

SEQ ID NO: 54853 - DNA, 80 bp, synthetic construct; identical to SEQ ID NO: 14404
  source 1..80: mol_type = other DNA

SEQ ID NO: 54854 - DNA, 80 bp, synthetic construct
  source 1..80: mol_type = other DNA
ccaaccctctaccccatcccatcccacacacatgcacatgagcacactctgcattctgacctcaacaacttcacttccac

SEQ ID NO: 54855 - DNA, 80 bp, synthetic construct
  source 1..80: mol_type = other DNA
ccatcctggaagggaaggtaagattgagactggttacagttgaagcggcagtatgaaaggaaggaaagtgggagggcgtt

SEQ ID NO: 54856 - DNA, 80 bp, synthetic construct
  source 1..80: mol_type = other DNA
tctctggcccgatttatcatatcccttttctcctccaaatatttctcctctcaccttttctctgggacttaagctgctat

SEQ ID NO: 54857 - DNA, 80 bp, synthetic construct; identical to SEQ ID NO: 14405
  source 1..80: mol_type = other DNA

SEQ ID NO: 54858 - DNA, 80 bp, synthetic construct
  source 1..80: mol_type = other DNA
cccctcaattcaggcaacaatgaaattaatggataccgtctgcccttggcccagaattgttatagcaaaaattttagaac

SEQ ID NO: 54859 - DNA, 80 bp, synthetic construct
  source 1..80: mol_type = other DNA
cccttgtcaccttgagataaaaattctttaggcaggaaaagaaatggaagtcagaaaaacattagaataagacaataatg

SEQ ID NO: 54860 - DNA, 80 bp, synthetic construct
  source 1..80: mol_type = other DNA
tccctgtgccactctggcatgaaggagacagtatagtgaatatggctacaggatgtttcttggaaacatgccaatatctt

SEQ ID NO: 54861 - DNA, 80 bp, synthetic construct; identical to SEQ ID NO: 14406
  source 1..80: mol_type = other DNA

SEQ ID NO: 54862 - DNA, 80 bp, synthetic construct
  source 1..80: mol_type = other DNA
tggccttacttttctcatccacaatgtaggagtaataatactttccttgcagagttattgataaaatttgaataattttg

SEQ ID NO: 54863 - DNA, 80 bp, synthetic construct
  source 1..80: mol_type = other DNA
gggtgaatttcttttcatatgataattgaaggatatttttctttttccagaatgagagaggctgagattggattggtaag

SEQ ID NO: 54864 - DNA, 80 bp, synthetic construct
  source 1..80: mol_type = other DNA
aaggagaaaataatttaaaacacagactgggaatcagtaagcacaggaaatctgaaccagtgatgatcatgaaaatgtcc

SEQ ID NO: 54865 - DNA, 80 bp, synthetic construct; identical to SEQ ID NO: 14407
  source 1..80: mol_type = other DNA

SEQ ID NO: 54866 - DNA, 80 bp, synthetic construct
  source 1..80: mol_type = other DNA
aaggaacatgcaacctagatctcttgcatgcacagttaaaaatagggttcgcactcctatgagaatctaatgccaccact

SEQ ID NO: 54867 - DNA, 80 bp, synthetic construct
  source 1..80: mol_type = other DNA
gctttaaaataaggtctatttttaaaaaggaaaagagaaggtaaccaattatgatcctaaatgtgtaaaataaaaatttt

SEQ ID NO: 54868 - DNA, 80 bp, synthetic construct
  source 1..80: mol_type = other DNA
gtctgtaatataaggggtatactgaatggcataatgaccagagtcatgcagaaatctacaaatgctgcccaactcagact

SEQ ID NO: 54869 - DNA, 80 bp, synthetic construct; identical to SEQ ID NO: 14408
  source 1..80: mol_type = other DNA

SEQ ID NO: 54870 - DNA, 80 bp, synthetic construct
  source 1..80: mol_type = other DNA
cctgggcaacaaagcaagaccttgtctctacaacacaaaaataaattaatgcatggcggcactcctgtagtcccagctac

SEQ ID NO: 54871 - DNA, 80 bp, synthetic construct
  source 1..80: mol_type = other DNA
gaaatatgtcaggtttgtacctaccacatttaaactagggacttgaagaattaaacattttattacaaatgaagcacttc

SEQ ID NO: 54872 - DNA, 80 bp, synthetic construct
  source 1..80: mol_type = other DNA
tttcttcagcaacaattcaagagagagagagaagagaagctatacattttaaaaggctgaagaaatatatgaaccaaatt

SEQ ID NO: 54873 - DNA, 80 bp, synthetic construct; identical to SEQ ID NO: 14409
  source 1..80: mol_type = other DNA

SEQ ID NO: 54874 - DNA, 80 bp, synthetic construct
  source 1..80: mol_type = other DNA
gcgtggtggtgggcacctgtaatgccagctacttgggaggctgaggcaggataattgcttgaacccaggaggcagaggtt

SEQ ID NO: 54875 - DNA, 80 bp, synthetic construct
  source 1..80: mol_type = other DNA
cccataaacataggcagagaagcattctgtttgaagttatgttagtttttaggctcttctcatttttatcacagttagga

SEQ ID NO: 54876 - DNA, 80 bp, synthetic construct
  source 1..80: mol_type = other DNA
ttggctatactaagcccccagacttgtttatatgttcattaattcatcaaaaatgcaaaaatggtcatggagtaccatta

SEQ ID NO: 54877 - DNA, 80 bp, synthetic construct; identical to SEQ ID NO: 14410
  source 1..80: mol_type = other DNA

SEQ ID NO: 54878 - DNA, 80 bp, synthetic construct
  source 1..80: mol_type = other DNA
acaagtttaaaatctttctaattagaattttatgaggccaacatcaccctgataccaaagcctggcagagacacaacaaa

SEQ ID NO: 54879 - DNA, 80 bp, synthetic construct
  source 1..80: mol_type = other DNA
aataaatgtaatccaccacataaacagaaccaatgacaaaaaccacatgattatctcaatagatgcagaaaaggacttcg

SEQ ID NO: 54880 - DNA, 80 bp, synthetic construct
  source 1..80: mol_type = other DNA
aggatgccctctctcaccactcttattcaacatattattggaagttctggccagggcaatcaggcaaaagaaagaaataa

SEQ ID NO: 54881 - DNA, 80 bp, synthetic construct; identical to SEQ ID NO: 14411
  source 1..80: mol_type = other DNA

SEQ ID NO: 54882 - DNA, 80 bp, synthetic construct
  source 1..80: mol_type = other DNA
caaggtaatttatggattcaatgctatccccatcaagctaccagtgactttcttcacagaattggaaaaaactactttaa

SEQ ID NO: 54883 - DNA, 80 bp, synthetic construct
  source 1..80: mol_type = other DNA
tacagtaaccaaaacagcatggtactggtaccaaaacagatatatagactgatggaacagaacagagtcctcagaaataa

SEQ ID NO: 54884 - DNA, 80 bp, synthetic construct
  source 1..80: mol_type = other DNA
aagatgcattaaagacttaaacataaaacctaaaaccataaaaaccccagaagaaaacctaggcaataccattcaggaca

SEQ ID NO: 54885 - DNA, 80 bp, synthetic construct; identical to SEQ ID NO: 14412
  source 1..80: mol_type = other DNA

SEQ ID NO: 54886 - DNA, 80 bp, synthetic construct
  source 1..80: mol_type = other DNA
aacagtgatcattaaaaagtcaggaaacaacagatgctggagaggatgtggagaaataggaatgcttttacactgttggt

SEQ ID NO: 54887 - DNA, 80 bp, synthetic construct
  source 1..80: mol_type = other DNA
tattgcggcactattcacaatagcaaagacttggatccaacccagatgtccatcaataatagactggataaagaaaatgt

SEQ ID NO: 54888 - DNA, 80 bp, synthetic construct
  source 1..80: mol_type = other DNA
aatgagaacacatggacacagggaggtgaacattacacacaggggcctgtcggggagtcgggggttgggggagggatagc

SEQ ID NO: 54889 - DNA, 80 bp, synthetic construct; identical to SEQ ID NO: 14413
  source 1..80: mol_type = other DNA

SEQ ID NO: 54890 - DNA, 80 bp, synthetic construct
  source 1..80: mol_type = other DNA
tctccctgctcggcctcccaaagtgttgggattacaggcctgagccaccacacccggccaaaaaagaattcttaatctgt

SEQ ID NO: 54891 - DNA, 80 bp, synthetic construct
  source 1..80: mol_type = other DNA
aggtcaggagatcaagaccatcctggctaacacggtgaaaccctgtctctactaaaagtacaaaaaattagccgggcatg

SEQ ID NO: 54892 - DNA, 80 bp, synthetic construct
  source 1..80: mol_type = other DNA
caatgaaatgtaatatgtggtagaaaagctaaaacagagaatagaccaaggaagtccaacctcaggttacagagctagag

SEQ ID NO: 54893 - DNA, 80 bp, synthetic construct; identical to SEQ ID NO: 14414
  source 1..80: mol_type = other DNA

SEQ ID NO: 54894 - DNA, 80 bp, synthetic construct
  source 1..80: mol_type = other DNA
tttgggaggccgaggcttgcggatcatgagctcaggagatcgagaccatggtgaaaccccgtctctactaaaaatacaaa

SEQ ID NO: 54895 - DNA, 80 bp, synthetic construct
  source 1..80: mol_type = other DNA
aaaaaaaatgtagaccttttcaaaatcacaatcaggcacagagaaagaataaaaatactgttggatatgaaaggacataa

SEQ ID NO: 54896 - DNA, 80 bp, synthetic construct
  source 1..80: mol_type = other DNA
cactgaaaagggatcctactatagcagttccttggcaagcaaagaatgtctgatacatgagtgatatttagaaaatgatg

SEQ ID NO: 54897 - DNA, 80 bp, synthetic construct; identical to SEQ ID NO: 14415
  source 1..80: mol_type = other DNA

SEQ ID NO: 54898 - DNA, 80 bp, synthetic construct
  source 1..80: mol_type = other DNA
tagggaaagggtttaggacatttatacccccacactgaccagtcattataggtggattcttcctgggaagtggagtaaaa

SEQ ID NO: 54899 - DNA, 80 bp, synthetic construct
  source 1..80: mol_type = other DNA
gttcctgagaatacatatatattcatgtggaagaaaacaaacaaataaatgtatgtttgttgttgttgttgttgttgttt

SEQ ID NO: 54900 - DNA, 80 bp, synthetic construct
  source 1..80: mol_type = other DNA
gagatggggcttcactatgttggccaggctggtctcaaactcttgacctcatgatccacccacctcggcctcccacgtgc

SEQ ID NO: 54901 - DNA, 80 bp, synthetic construct; identical to SEQ ID NO: 14416
  source 1..80: mol_type = other DNA

SEQ ID NO: 54902 - DNA, 80 bp, synthetic construct
  source 1..80: mol_type = other DNA
aatctaaaaaagtcaaaatcacagcaggtggggaaatgggggtagtagggagggcgacaaggaggaatgagaaaatgttg

SEQ ID NO: 54903 - DNA, 80 bp, synthetic construct
  source 1..80: mol_type = other DNA
gtggggcatgccagtagtcccagctactccagagattgaggtgggaggatggactgagcccaggaagtcaaggctgcagt

SEQ ID NO: 54904 - DNA, 80 bp, synthetic construct
  source 1..80: mol_type = other DNA
atgagagattggttccaggatcctctctgtataccaaaatctgagaatgctcaagtcccttattaaaaatggcttagttt

SEQ ID NO: 54905 - DNA, 80 bp, synthetic construct; identical to SEQ ID NO: 14417
  source 1..80: mol_type = other DNA

SEQ ID NO: 54906 - DNA, 80 bp, synthetic construct
  source 1..80: mol_type = other DNA
ctgggcatggtagtgcatgcctgtagtcccagctatttgggaggctgaggcaggagaattgcttgaatcccagaggcgga

SEQ ID NO: 54907 - DNA, 80 bp, synthetic construct
  source 1..80: mol_type = other DNA
aatcacatgtatcaaaaagtcatgtagtaccctgtaaatgcagttatttgtcaattaaaaatgattaacgagtttaaaat

SEQ ID NO: 54908 - DNA, 80 bp, synthetic construct
  source 1..80: mol_type = other DNA
ttatgttgcaacaagatcttaacccacagtaaaaagtagatctcagtggcttaactcaataaggagacttaatttcacag

SEQ ID NO: 54909 - DNA, 80 bp, synthetic construct; identical to SEQ ID NO: 14418
  source 1..80: mol_type = other DNA

SEQ ID NO: 54910 - DNA, 80 bp, synthetic construct
  source 1..80: mol_type = other DNA
tttaaagctgggcatctgggggagacatcacacattggtaggatccgtgatgccccacaagccacaaaaaccagcaagtt

SEQ ID NO: 54911 - DNA, 80 bp, synthetic construct
  source 1..80: mol_type = other DNA
caggcaccattgtcattgataacatcttatcaggagacagggttttgagatcaaccggtctgatcaaaatttattaggcg

SEQ ID NO: 54912 - DNA, 80 bp, synthetic construct
  source 1..80: mol_type = other DNA
aaaaagaattcaatgatatttctcccatttgcttttgaaagaagagaaatatgactctgttccacctggctcactggcag

SEQ ID NO: 54913 - DNA, 80 bp, synthetic construct
  source 1..80: mol_type = other DNA
ctgacaggattaagagattaaagtaaagacaggcataggaaatcacaagggtattgattgggaaagtgataagtgtccat

SEQ ID NO: 54914 - DNA, 80 bp, synthetic construct; identical to SEQ ID NO: 14419
  source 1..80: mol_type = other DNA

SEQ ID NO: 54915 - DNA, 80 bp, synthetic construct
  source 1..80: mol_type = other DNA
ttatagggcttatgcttcaactagaaaaatcagatctcgatgtctccctaaactttgagtctggttcaatccccagccct

SEQ ID NO: 54916 - DNA, 80 bp, synthetic construct
  source 1..80: mol_type = other DNA
cgctcagcatactgaggactcacgccggccccagtctctgagttccctcagtatttattgatcattatctctaccctctc

SEQ ID NO: 54917 - DNA, 80 bp, synthetic construct
  source 1..80: mol_type = other DNA
gccaccagcatgtctcatttccagccctaaggcagttttctcctatctcagtagatagaatatacaatcgggttttaaac

SEQ ID NO: 54918 - DNA, 80 bp, synthetic construct; identical to SEQ ID NO: 14420
  source 1..80: mol_type = other DNA

SEQ ID NO: 54919 - DNA, 80 bp, synthetic construct
  source 1..80: mol_type = other DNA
tgtttctgcaagcacagggttggggatagggatacagattaacagcatctcaaggcagaagaatttttcttactacagaa

SEQ ID NO: 54920 - DNA, 80 bp, synthetic construct
  source 1..80: mol_type = other DNA
ctatggtcaatgacaatgcccaccctgaggaagaggacaaaatcagcacaaaacttttgactccattcagcattctgctt

SEQ ID NO: 54921 - DNA, 80 bp, synthetic construct
  source 1..80: mol_type = other DNA
aaggagacctagttctccactctgacctcatccataagaaggaagagcctgccaaagactcctcacgcccagtgtgtggg

SEQ ID NO: 54922 - DNA, 80 bp, synthetic construct; identical to SEQ ID NO: 14421
  source 1..80: mol_type = other DNA

SEQ ID NO: 54923 - DNA, 80 bp, synthetic construct
  source 1..80: mol_type = other DNA
catctgcacactggaagtcatttccaggaccacaaggatctggaaaatccagtcctccttcctaataagagcgatggaca

SEQ ID NO: 54924 - DNA, 80 bp, synthetic construct
  source 1..80: mol_type = other DNA
aacacacacacacacacagagagagatgaggtaagatatgaagtgataaggaagacaaatacagaaaaatagatgcaaaa

SEQ ID NO: 54925 - DNA, 80 bp, synthetic construct
  source 1..80: mol_type = other DNA
tgagacagatgcccagatagagacataacagaaagagaggtgaagatctcgttgaatatctggaactagtaacttgtgaa

SEQ ID NO: 54926 - DNA, 80 bp, synthetic construct; identical to SEQ ID NO: 14422
  source 1..80: mol_type = other DNA

SEQ ID NO: 54927 - DNA, 80 bp, synthetic construct
  source 1..80: mol_type = other DNA
aaccatgaatgatgcgacaattgaattattttctacctcctctgcccacccttacttcacaccccaaaatgctttcagtg

SEQ ID NO: 54928 - DNA, 80 bp, synthetic construct
  source 1..80: mol_type = other DNA
caggtaatgtttttcatgtgcttctcttgagcagtctgaggaaagaatagaaacagaaaccccttgggacctgagtagac

SEQ ID NO: 54929 - DNA, 80 bp, synthetic construct
  source 1..80: mol_type = other DNA
ttctgggcaggcataagcaggcatcacagaagagtgataaccaatcctagttaaaatagtctcaggagtcagtgcagaag

SEQ ID NO: 54930 - DNA, 80 bp, synthetic construct; identical to SEQ ID NO: 14423
  source 1..80: mol_type = other DNA

SEQ ID NO: 54931 - DNA, 80 bp, synthetic construct
  source 1..80: mol_type = other DNA
tttcacaagaagatgccaccaaagttaaggcttggttctggggaacaatgtctggagattcctagaaactggcaaacttc

SEQ ID NO: 54932 - DNA, 80 bp, synthetic construct
  source 1..80: mol_type = other DNA
aaaggaagttatgcagagaaaggtctcattacacaaacagccactctctcaccccaaaggaaaatgacacacatgactta

SEQ ID NO: 54933 - DNA, 80 bp, synthetic construct
  source 1..80: mol_type = other DNA
atggtaaggatgccctggaataagctctatcagtcagctctgtgacagcgctacctttcaaccagtaaaatcagattcca

SEQ ID NO: 54934 - DNA, 80 bp, synthetic construct; identical to SEQ ID NO: 14424
  source 1..80: mol_type = other DNA

SEQ ID NO: 54935 - DNA, 80 bp, synthetic construct
  source 1..80: mol_type = other DNA
ccaataggtccttggatacagtgaataggtgagagagtggggaagcaaatctctgctcttcaagaactcatccataacct

SEQ ID NO: 54936 - DNA, 80 bp, synthetic construct
  source 1..80: mol_type = other DNA
tagtctcctgtgattcccagctcagtagtgacatcagggataagagatgggaaggaatgggtcagaaggagctctttgtc

SEQ ID NO: 54937 - DNA, 80 bp, synthetic construct
  source 1..80: mol_type = other DNA
aataaggggggtggacacaacgccggctgtctcctcctgatcattccgaaaccaccggactttgatctggcctggataga

SEQ ID NO: 54938 - DNA, 80 bp, synthetic construct; identical to SEQ ID NO: 14425
  source 1..80: mol_type = other DNA

SEQ ID NO: 54939 - DNA, 80 bp, synthetic construct
  source 1..80: mol_type = other DNA
aaaagtaggcaggccttcaaaacaaataacccttgatcaaacatcatgtttgtccacaactcaattcctttatcttctca

SEQ ID NO: 54940 - DNA, 80 bp, synthetic construct
  source 1..80: mol_type = other DNA
ctcattttctttttttccttaatttctttttaacgcacaagtgagtttaattactagctgtctaccctactccatttcct

SEQ ID NO: 54941 - DNA, 80 bp, synthetic construct
  source 1..80: mol_type = other DNA
cccaattaaatggcactcttgagccatcatccggaaggaatcatggtttctgcttggacttgaacttttctttaggttct

SEQ ID NO: 54942 - DNA, 80 bp, synthetic construct; identical to SEQ ID NO: 14426
  source 1..80: mol_type = other DNA

SEQ ID NO: 54943 - DNA, 80 bp, synthetic construct
  source 1..80: mol_type = other DNA
aatgttgtgtactttgggaggcttaagatcttggtgagtaattgtgggctgattacttaaagtgtttatcatgtaccaat

SEQ ID NO: 54944 - DNA, 80 bp, synthetic construct
  source 1..80: mol_type = other DNA
gtgatgggggggaggggataacctaggccaaaagcaacctgaaactatttttatccaataatttaatagcttcaacctat

SEQ ID NO: 54945 - DNA, 80 bp, synthetic construct
  source 1..80: mol_type = other DNA
agactttgtattcacaaattctattaagatccaagtcagtaagagtttacttgaaagcattaagcaaaatgttagaaaat

SEQ ID NO: 54946 - DNA, 80 bp, synthetic construct; identical to SEQ ID NO: 14427
  source 1..80: mol_type = other DNA

SEQ ID NO: 54947 - DNA, 80 bp, synthetic construct
  source 1..80: mol_type = other DNA
agagggtgggcactgggggcagagagaactgcttagcgaaggtaaggtacgaggaggcaaacacataaggcacgaggcga

SEQ ID NO: 54948 - DNA, 80 bp, synthetic construct
  source 1..80: mol_type = other DNA
ggaatgaactgggctcagatttcagagacctcgcccccatcgcccctcccggcacagaaactcggggtctcggccaaggg

SEQ ID NO: 54949 - DNA, 80 bp, synthetic construct
  source 1..80: mol_type = other DNA
cgtcaccgcgcggtacacccccacgtcgctgtcgaagcgcgcgtactcctctcggttatagatgtatctggtcacaagac

SEQ ID NO: 54950 - DNA, 80 bp, synthetic construct; identical to SEQ ID NO: 14428
  source 1..80: mol_type = other DNA

SEQ ID NO: 54951 - DNA, 80 bp, synthetic construct
  source 1..80: mol_type = other DNA
gaagctcctggatacctcagagataaagttatccacataaatctgagagttcaacggaatgacgagataggtccaggaat

SEQ ID NO: 54952 - DNA, 80 bp, synthetic construct
  source 1..80: mol_type = other DNA
tggaaagagcacaagcttttgaatttgataaactagattccaattaaactgtggcagtcaccagtttgggcaggttatgt

SEQ ID NO: 54953 - DNA, 80 bp, synthetic construct
  source 1..80: mol_type = other DNA
cctactaaattcagtccaccattaactcgggtctctgaatcccactcaagtcaccatttgcccataaatcagtgaaaccc

SEQ ID NO: 54954 - DNA, 80 bp, synthetic construct; identical to SEQ ID NO: 14429
  source 1..80: mol_type = other DNA

SEQ ID NO: 54955 - DNA, 80 bp, synthetic construct
  source 1..80: mol_type = other DNA
ttcccaagagagaggaaatgttgatgaaagattgtgtccaagatcatagagatcaccatcccccataccccagcccaagg

SEQ ID NO: 54956 - DNA, 80 bp, synthetic construct
  source 1..80: mol_type = other DNA
aactgagacgaagggaaaagcagtggtagtcaacacagctcggacctgatggatctgatgtacctggcagaaagaataaa

SEQ ID NO: 54957 - DNA, 80 bp, synthetic construct
  source 1..80: mol_type = other DNA
gatgaacatctgaggtgaaaatttcctctcgattatagaagagctgaagaacgaatgcctcggggattttgagaggcaaa

SEQ ID NO: 54958 - DNA, 80 bp, synthetic construct; identical to SEQ ID NO: 14430
  source 1..80: mol_type = other DNA

SEQ ID NO: 54959 - DNA, 80 bp, synthetic construct
  source 1..80: mol_type = other DNA
atgtgtaactatcaggttaatatgtggaacaagaaaacaagccaaaaaaaaaaaattgatacccacccctgctggtaaat

SEQ ID NO: 54960 - DNA, 80 bp, synthetic construct
  source 1..80: mol_type = other DNA
gaattttacagtattcggatgcagtcatgtttcgttttgaagagagagcacaaaacctgtggagaagcatttcctgggtc

SEQ ID NO: 54961 - DNA, 80 bp, synthetic construct
  source 1..80: mol_type = other DNA
taaataaacataacttatcaggctcctcttgacagtgactaggggcaatactaatggttataaagcaattagaacaacgc

SEQ ID NO: 54962 - DNA, 80 bp, synthetic construct; identical to SEQ ID NO: 14431
  source 1..80: mol_type = other DNA

SEQ ID NO: 54963 - DNA, 80 bp, synthetic construct
  source 1..80: mol_type = other DNA
aaaggaggaaccaaatgcacacctggaatggagttggggcaaggaagaataggcagagagacctgaaggtgccctcaatg

SEQ ID NO: 54964 - DNA, 80 bp, synthetic construct
  source 1..80: mol_type = other DNA
ttcagctagcaacaagtgtcactttagagcctttttctgattggctaaaacctcactggaaaggttttgctttgggcttc

SEQ ID NO: 54965 - DNA, 80 bp, synthetic construct
  source 1..80: mol_type = other DNA
cctctgtggaggcagagcaattaaagcatttactccatatgggtaaatgggctaaaaagtcactgccattagtagggagg

SEQ ID NO: 54966 - DNA, 80 bp, synthetic construct; identical to SEQ ID NO: 14432
  source 1..80: mol_type = other DNA

SEQ ID NO: 54967 - DNA, 80 bp, synthetic construct
  source 1..80: mol_type = other DNA
ctaggtaaccagctatatataagaatttttcatggcacatataaactaggtcctttctcttggcacaaagttatctcttt

SEQ ID NO: 54968 - DNA, 80 bp, synthetic construct
  source 1..80: mol_type = other DNA
ggaaaagctttagcaggaaggtagaaaatcaggtgatacaaagcatttggaacatttgagggcaaatgaggaacgtgggt

SEQ ID NO: 54969 - DNA, 80 bp, synthetic construct
  source 1..80: mol_type = other DNA
gtacaatgaagctttgtttcctgatctatcttttcaggttcctttttcctgtcagtctcctcatccacgcattgcctcag

SEQ ID NO: 54970 - DNA, 80 bp, synthetic construct
  source 1..80: mol_type = other DNA
tcttcccccagcctctagattagtagtcaccatgctccttcattcccagaaaaaatttaaatatttctctgtgagatctt

SEQ ID NO: 54971 - DNA, 80 bp, synthetic construct; identical to SEQ ID NO: 14433
  source 1..80: mol_type = other DNA

SEQ ID NO: 54972 - DNA, 80 bp, synthetic construct
  source 1..80: mol_type = other DNA
aaaggaaacatttgtacactgttggtggggatgcagattagtacaaccattatggaaaacagtatggaagttcctcaaaa

SEQ ID NO: 54973 - DNA, 80 bp, synthetic construct
  source 1..80: mol_type = other DNA
tgaaaagataaagaaaatgtggtatatatacacaattaaatcctattcaggctttaaaaagaaggaaatcctgttgtaag

SEQ ID NO: 54974 - DNA, 80 bp, synthetic construct
  source 1..80: mol_type = other DNA
aggaggggaaggagaaaaaaaaggaggaagagtaggccatgatacaagtggttacattcctgagtctttgattagcttaa

SEQ ID NO: 54975 - DNA, 80 bp, synthetic construct; identical to SEQ ID NO: 14434
  source 1..80: mol_type = other DNA

SEQ ID NO: 54976 - DNA, 80 bp, synthetic construct
  source 1..80: mol_type = other DNA
tgtttattttattttattttgttttatgttctagcgtacatgtgtaggacatgcaggtttgttacatgggtaaacgtgtg

SEQ ID NO: 54977 - DNA, 80 bp, synthetic construct
  source 1..80: mol_type = other DNA
ttattagtgagaacatgcagtatttggttttctgttccttcattattttgctgaggacaatggcttccagctccatccat

SEQ ID NO: 54978 - DNA, 80 bp, synthetic construct; identical to SEQ ID NO: 14435
  source 1..80: mol_type = other DNA

SEQ ID NO: 54979 - DNA, 80 bp, synthetic construct
  source 1..80: mol_type = other DNA
cttcctcattttctcttgccgcagccatgtaaaaagtgcctttcacctcccacaatgattctgaggcctccccagtcatg

SEQ ID NO: 54980 - DNA, 80 bp, synthetic construct
  source 1..80: mol_type = other DNA
cagaggttggagcagtttggagggctccaaagaagacaggaaaatgtgggaaagtttggaacctcctagaaatttgttga

SEQ ID NO: 54981 - DNA, 80 bp, synthetic construct
  source 1..80: mol_type = other DNA
gtggaactttgaacttgagagagatgatttagagtatctggcagaagaaatttctaagcagcaaaacattcaagaggtga

SEQ ID NO: 54982 - DNA, 80 bp, synthetic construct; identical to SEQ ID NO: 14436
  source 1..80: mol_type = other DNA

SEQ ID NO: 54983 - DNA, 80 bp, synthetic construct
  source 1..80: mol_type = other DNA
ggcagcctccatgtggtgttgagcctgcaggtgcacagaagtcaagaattgaggtttggaaacctccacctagatttcag

SEQ ID NO: 54984 - DNA, 80 bp, synthetic construct
  source 1..80: mol_type = other DNA
ggccaccatcctccagaccccagaatggtagatccactgacagcttgcactgtgggcctggaaaagccacagacactcaa

SEQ ID NO: 54985 - DNA, 80 bp, synthetic construct
  source 1..80: mol_type = other DNA
ctgggtgtggtggctcatgcctgtaatcccagcactttgaaagaccaaggtgggcggaccacgaggtcaggagattgaga

SEQ ID NO: 54986 - DNA, 80 bp, synthetic construct; identical to SEQ ID NO: 14437
  source 1..80: mol_type = other DNA

SEQ ID NO: 54987 - DNA, 80 bp, synthetic construct
  source 1..80: mol_type = other DNA
ctcataggtggaagggacttgccttgtctcagatgagactttggactatggacttttgggttaatgctgaaatgagttaa

SEQ ID NO: 54988 - DNA, 80 bp, synthetic construct
  source 1..80: mol_type = other DNA
caatgggaggtaactgaatcatgggagccagtctttcccatgctattcttatgatagtggataagtcgcacgagatctga

SEQ ID NO: 54989 - DNA, 80 bp, synthetic construct
  source 1..80: mol_type = other DNA
tctttatcagcagcatgaaaacgaactaatacactcagtaatagaatagttgggtcaaatggtatttctggttctaggtc

SEQ ID NO: 54990 - DNA, 80 bp, synthetic construct; identical to SEQ ID NO: 14438
  source 1..80: mol_type = other DNA

SEQ ID NO: 54991 - DNA, 80 bp, synthetic construct
  source 1..80: mol_type = other DNA
aatagtttattttgctgtagagaagctcttcagtttaattagatcccatttgtcagcatttgcttttgttgcaattgctt

SEQ ID NO: 54992 - DNA, 80 bp, synthetic construct
  source 1..80: mol_type = other DNA
ctttatgcatatggctagccagttctcccagcaccatttattaaatagggaatcctttccccattgcttgtttttatcag

SEQ ID NO: 54993 - DNA, 80 bp, synthetic construct
  source 1..80: mol_type = other DNA
ttttgcttaggatgattgtcttggctaatgggcttttggttccgtgtgaatttttaaatagttttcttctaattctgtga

SEQ ID NO: 54994 - DNA, 80 bp, synthetic construct; identical to SEQ ID NO: 14439
  source 1..80: mol_type = other DNA

SEQ ID NO: 54995 - DNA, 80 bp, synthetic construct
  source 1..80: mol_type = other DNA
ctgtaaagaaagacaatttgacttcttctcttcctatttaaatatgctttatttctttttcttgcctgattgtcctggcc

SEQ ID NO: 54996 - DNA, 80 bp, synthetic construct
  source 1..80: mol_type = other DNA
tacctagtttattgagagtttttaacatgaagggatgttgaattttattgaaggtctttcctgtgtctattgagacaatc

SEQ ID NO: 54997 - DNA, 80 bp, synthetic construct
  source 1..80: mol_type = other DNA
tttttttttattagtgtccatcagagatattggcctgaagttttctttttttgttgtatctgtgtcaggttttgttatca

SEQ ID NO: 54998 - DNA, 80 bp, synthetic construct; identical to SEQ ID NO: 14440
  source 1..80: mol_type = other DNA

SEQ ID NO: 54999 - DNA, 80 bp, synthetic construct
  source 1..80: mol_type = other DNA
tctagctggcagtctgtctatattattaatattttcaaaagaccagatcctggattcgttgattttttgaagagtttttt

SEQ ID NO: 55000 - DNA, 80 bp, synthetic construct
  source 1..80: mol_type = other DNA
taaatttcccacttaacactgctttagctgcatcccagagattctgatacattgtctctttcttctcattggtttcaaag

SEQ ID NO: 55001 - DNA, 80 bp, synthetic construct
  source 1..80: mol_type = other DNA
ttcttttgcatttgctgaggagtgttttacttccaaatatgtgatcaattttagaataagtgccatgtggcaccaagaag

SEQ ID NO: 55002 - DNA, 80 bp, synthetic construct
  source 1..80: mol_type = other DNA
ttatgtatgtatacatgtgccatgttggtgtgctgcacccattaactcgtcatttagcattaggtatatctcctaatgct

SEQ ID NO: 55003 - DNA, 80 bp, synthetic construct; identical to SEQ ID NO: 14441
  source 1..80: mol_type = other DNA

SEQ ID NO: 55004 - DNA, 80 bp, synthetic construct
  source 1..80: mol_type = other DNA
ttggtagattttcctccattcctttattttgaatgtatgcgtgtcttcgcacatgagatgggtctcttgcatacaacaca

SEQ ID NO: 55005 - DNA, 80 bp, synthetic construct
  source 1..80: mol_type = other DNA
tagtgtcattggtctgtgtactttagtgtgtttttgtagtggctggtaatggtttttcctttccacatccagtgcttcct

SEQ ID NO: 55006 - DNA, 80 bp, synthetic construct
  source 1..80: mol_type = other DNA
ccaatctcctctggcttgtagggtgtctgctgagaggtctgctgttactcttacggtcttccctttgcaggtgacctggc

SEQ ID NO: 55007 - DNA, 80 bp, synthetic construct; identical to SEQ ID NO: 14442
  source 1..80: mol_type = other DNA

SEQ ID NO: 55008 - DNA, 80 bp, synthetic construct
  source 1..80: mol_type = other DNA
tgtgttgtgtttttcagctccatcaacctatttatgttcctctctaaactggttattctggttaactggttaacagctcc

SEQ ID NO: 55009 - DNA, 80 bp, synthetic construct
  source 1..80: mol_type = other DNA
aatcatttggaggagaagagacactatggatttttgtattttcagcatttgttgttgactttttcgcatcttcatgggtt

SEQ ID NO: 55010 - DNA, 80 bp, synthetic construct
  source 1..80: mol_type = other DNA
ccagatccaactcacctgggtccctcctgcacctggaggtgtcaccagtggaggctgcagaacagcaaaggtggctgcct

SEQ ID NO: 55011 - DNA, 80 bp, synthetic construct; identical to SEQ ID NO: 14443
  source 1..80: mol_type = other DNA

SEQ ID NO: 55012 - DNA, 80 bp, synthetic construct
  source 1..80: mol_type = other DNA
aattcctgcagagaggccccaccaagcgaagaaggatggatccggatcccacctacagaagcagtctggccacgatctgc

SEQ ID NO: 55013 - DNA, 80 bp, synthetic construct
  source 1..80: mol_type = other DNA
gaaactcagttgttttaatcagtccccaacatgctgccactggccacaatcccagcagccattaagagtgtgcacagttc

SEQ ID NO: 55014 - DNA, 80 bp, synthetic construct
  source 1..80: mol_type = other DNA
tcattcaccatctcccttggcttggggtgggagttccccttaccccttgtgactcctgggtgggctgttgctccactctg

SEQ ID NO: 55015 - DNA, 80 bp, synthetic construct
  source 1..80: mol_type = other DNA
cagaccagagctacttctaatcaacattcttggcctctcccttgtttttttattgttgggttttagaatttctttacaaa

SEQ ID NO: 55016 - DNA, 80 bp, synthetic construct; identical to SEQ ID NO: 14444
  source 1..80: mol_type = other DNA

SEQ ID NO: 55017 - DNA, 80 bp, synthetic construct
  source 1..80: mol_type = other DNA
agaacctttccaagagattaactttctattttcaaagaccaacaattccacccaggtaaattactgcaaaggcatcctga

SEQ ID NO: 55018 - DNA, 80 bp, synthetic construct
  source 1..80: mol_type = other DNA
gattaaatgaaatggcaaatataaagcatcaaaaatagtgttgaacacatagtagataataataattatttttaaatatt

SEQ ID NO: 55019 - DNA, 80 bp, synthetic construct
  source 1..80: mol_type = other DNA
cctcccctcttctgagtctccaatgtccattttaccactctgcatgcctttgtgtacccatagcctagctcccacttgta

SEQ ID NO: 55020 - DNA, 80 bp, synthetic construct; identical to SEQ ID NO: 14445
  source 1..80: mol_type = other DNA

SEQ ID NO: 55021 - DNA, 80 bp, synthetic construct
  source 1..80: mol_type = other DNA
gttatataagatgtgacaattggggaaaactggatgaagggtatagagaatctttctgtactatcttggtaacttcctct

SEQ ID NO: 55022 - DNA, 80 bp, synthetic construct
  source 1..80: mol_type = other DNA
aaagagaaaagaagagtgggggataaaagcaaaacagagcatccacgagctgtagtaccatatcaaatggtactatattt

SEQ ID NO: 55023 - DNA, 80 bp, synthetic construct
  source 1..80: mol_type = other DNA
aggtctgtaccaccacactcagttaatttttgtattttttgtaaagatggtgtctccccatgttacccagactggtctca

SEQ ID NO: 55024 - DNA, 80 bp, synthetic construct
  source 1..80: mol_type = other DNA
atttttattgatctatttcaaattcattgatgcttcccagggctgtgtcaagtttgctgatgagtttgacaaatgtattt

SEQ ID NO: 55025 - DNA, 80 bp, synthetic construct; identical to SEQ ID NO: 14446
  source 1..80: mol_type = other DNA

SEQ ID NO: 55026 - DNA, 80 bp, synthetic construct
  source 1..80: mol_type = other DNA
acatgcccacacacaagttatgtaaagcaggtttattacttacagatcagtagcaagggacagaagaagcctcagctcca

SEQ ID NO: 55027 - DNA, 80 bp, synthetic construct
  source 1..80: mol_type = other DNA
tctaacagtaattttgcatgaactcatgtgttctaaaactacaaccaagtgtgcatttcttcctgataggcatttaacac

SEQ ID NO: 55028 - DNA, 80 bp, synthetic construct
  source 1..80: mol_type = other DNA
ccagacttcagcaggtttaaaaactaggtggttgttctggtttggtgatagatactacaatcccagaagggtttatgctc

SEQ ID NO: 55029 - DNA, 80 bp, synthetic construct
  source 1..80: mol_type = other DNA
ttagggaatttgggtgtggagtttacaatgtatcttcatgggatgcttctttattctggaagatggtctaatgcctaagt

SEQ ID NO: 55030 - DNA, 80 bp, synthetic construct; identical to SEQ ID NO: 14447
  source 1..80: mol_type = other DNA

SEQ ID NO: 55031 - DNA, 80 bp, synthetic construct
  source 1..80: mol_type = other DNA
tcaaggttgaagggaatgctcccttgcccctccaccttccaccatgtgattcactttccgccatgtgaagacactgcaag

SEQ ID NO: 55032 - DNA, 80 bp, synthetic construct
  source 1..80: mol_type = other DNA
aacagtcaaagacaacatcctagagggcaatgtcttccagccagcaccattcaattattcttttggactgactacatcta

SEQ ID NO: 55033 - DNA, 80 bp, synthetic construct
  source 1..80: mol_type = other DNA
atgtaggtgagaatagcaaatccatatccaaagtgtatactaattccagaaagaataaatcacttcccctccaaggtgga

SEQ ID NO: 55034 - DNA, 80 bp, synthetic construct
  source 1..80: mol_type = other DNA
aagaagataatccttgttgactgtagtcctggttgttgagaccatgcatattacttttcccttcattagaggaggactac

SEQ ID NO: 55035 - DNA, 80 bp, synthetic construct; identical to SEQ ID NO: 14448
  source 1..80: mol_type = other DNA

SEQ ID NO: 55036 - DNA, 80 bp, synthetic construct
  source 1..80: mol_type = other DNA
aatgagaggcaccatattagagtatggcagcttggatccctgaatcaccagcttgagaagagctactcacaaatcatcag

SEQ ID NO: 55037 - DNA, 80 bp, synthetic construct
  source 1..80: mol_type = other DNA
taatggtttctcctgagctagacttacttgaaatggtcctcattttttgttttagtattaccagagatgtaagacagaat

SEQ ID NO: 55038 - DNA, 80 bp, synthetic construct
  source 1..80: mol_type = other DNA
tcaatttttattatcctgaaagcacctatggaaatactaccttttttgaagttaaatacgagcactctgctccatgctgt

SEQ ID NO: 55039 - DNA, 80 bp, synthetic construct; identical to SEQ ID NO: 14449
  source 1..80: mol_type = other DNA

SEQ ID NO: 55040 - DNA, 80 bp, synthetic construct
  source 1..80: mol_type = other DNA
agtactttccttgccagccaatgagaagaagtgaagcagcatcatttgtctctggctgactgagccagtaagtctgttac

SEQ ID NO: 55041 - DNA, 80 bp, synthetic construct
  source 1..80: mol_type = other DNA
tttccaaacaaaatacatagactttgtgatgctttaatctaaatatcaataagatagttttgttaacaaaatgtttctaa

SEQ ID NO: 55042 - DNA, 80 bp, synthetic construct
  source 1..80: mol_type = other DNA
aagcagatccaaatttatgttatgattaacgagatcgaaattgtatttatagtagtctccccttattcatgggggataca

SEQ ID NO: 55043 - DNA, 80 bp, synthetic construct; identical to SEQ ID NO: 14450
  source 1..80: mol_type = other DNA

SEQ ID NO: 55044 - DNA, 80 bp, synthetic construct
  source 1..80: mol_type = other DNA
aaacatatttcgaagaagcttccagtgttatagtttatattcttcatttctttgaggcacagaagaacccatttcactct

SEQ ID NO: 55045 - DNA, 80 bp, synthetic construct
  source 1..80: mol_type = other DNA
gtggaatggaagagaaagcagcgtagtggtgaggaaattctggtgggtgaagacattctcaggtgaaatttttagaagaa

SEQ ID NO: 55046 - DNA, 80 bp, synthetic construct
  source 1..80: mol_type = other DNA
tttactcttgcttgttaaagaatgccacattagaactgctttcaagaacagaacaagttatcctgaatttatgttggata

SEQ ID NO: 55047 - DNA, 80 bp, synthetic construct
  source 1..80: mol_type = other DNA
tttaaatgtaaatcaagaaggaactcaaaatacagaaaaagatacatgttaatatttattttattaaaaagtgttggaat

SEQ ID NO: 55048 - DNA, 80 bp, synthetic construct; identical to SEQ ID NO: 14451
  source 1..80: mol_type = other DNA

SEQ ID NO: 55049 - DNA, 80 bp, synthetic construct
  source 1..80: mol_type = other DNA
gcctgttggcagaattcatttccacatatgactgaggtccatagcaactataaatataggtgcatctaataaaatatcct

SEQ ID NO: 55050 - DNA, 80 bp, synthetic construct
  source 1..80: mol_type = other DNA
aatagactcaaatatattataaagttattgtctatgttctcatctatgtgccaggtggtagattcaccagtgcctattca

SEQ ID NO: 55051 - DNA, 80 bp, synthetic construct
  source 1..80: mol_type = other DNA
gtgaaaccctgtctctactaaaaaaatacaaaattaccagggtatggtggtatgcaccttagtcccagctactcaggaga

SEQ ID NO: 55052 - DNA, 80 bp, synthetic construct; identical to SEQ ID NO: 14452
  source 1..80: mol_type = other DNA

SEQ ID NO: 55053 - DNA, 80 bp, synthetic construct
  source 1..80: mol_type = other DNA
tagttgctatgttttccttttcttttctttctttttttagacaaagtctggctctatcgcccaggctggagtgcagtggt

SEQ ID NO: 55054 - DNA, 80 bp, synthetic construct
  source 1..80: mol_type = other DNA
atcataagctcaagcggtccacctgcctcagcctcccaaagtgctgggattacaggtgtgagcccctgtgcccagccttt

SEQ ID NO: 55055 - DNA, 80 bp, synthetic construct
  source 1..80: mol_type = other DNA
aatgacttttatgctttaggtatgtgtcttgtaaacagtataacctgaatttatgtttttgcattcaatttgtcagtctc

SEQ ID NO: 55056 - DNA, 80 bp, synthetic construct; identical to SEQ ID NO: 14453
  source 1..80: mol_type = other DNA

SEQ ID NO: 55057 - DNA, 80 bp, synthetic construct
  source 1..80: mol_type = other DNA
tcctcgctcagactatataactctagacccagcctgttaatatggactgcttgtattttttcagagaaacctctaaaaga

SEQ ID NO: 55058 - DNA, 80 bp, synthetic construct
  source 1..80: mol_type = other DNA
gtttgaacagttatcttttacagccagaataacaatactagttaataccagaggactaatctatgggtagctcgtttcaa

SEQ ID NO: 55059 - DNA, 80 bp, synthetic construct
  source 1..80: mol_type = other DNA
agtgaactaggtaacaaatgagaagacttacatacgcttagttcttgcaggaggaaaggaactatctgggtatggaaaag

SEQ ID NO: 55060 - DNA, 80 bp, synthetic construct
  source 1..80: mol_type = other DNA
tatgatgaggcagagtcacttgtctctggcagtccaagctactaagaagcacaaataaaatatatagtagcagggggaga

SEQ ID NO: 55061 - DNA, 80 bp, synthetic construct; identical to SEQ ID NO: 14454
  source 1..80: mol_type = other DNA

SEQ ID NO: 55062 - DNA, 80 bp, synthetic construct
  source 1..80: mol_type = other DNA
gttttctttaagtttacttttttattttttttttttgagcagaatagttgtccaggtgcagtggctgacttatttattta

SEQ ID NO: 55063 - DNA, 80 bp, synthetic construct
  source 1..80: mol_type = other DNA
cctcctcccccctccccacaacaggcccccatgtgtgtgatgttccccttcctgtgtccaagtgttctcattgttctttt

SEQ ID NO: 55064 - DNA, 80 bp, synthetic construct
  source 1..80: mol_type = other DNA
gttgggaagtagagccaagatgtaggagtaggaggggagttgagaaccaacaattcagtaaaaatgctttcagtcaattc

SEQ ID NO: 55065 - DNA, 80 bp, synthetic construct
  source 1..80: mol_type = other DNA
acaggcacctgccaccatgcttggctaatttttgtatttttagtagagacggggtttcaccatgtggccaggctggtctc

SEQ ID NO: 55066 - DNA, 80 bp, synthetic construct; identical to SEQ ID NO: 14455
  source 1..80: mol_type = other DNA

SEQ ID NO: 55067 - DNA, 80 bp, synthetic construct
  source 1..80: mol_type = other DNA
tttaaaaatacagatgttaaatgaaatctgtatgtggaactattggtctcaatgatatatgcaactctggaagttgggta

SEQ ID NO: 55068 - DNA, 80 bp, synthetic construct
  source 1..80: mol_type = other DNA
tcccaccttggcctctcaaattgctcaagcatcttctctgaacccagttgaataaaactggaaattaataagaagagaaa

SEQ ID NO: 55069 - DNA, 80 bp, synthetic construct
  source 1..80: mol_type = other DNA
aacataccaaaacccatgggatacagcaaaagcagtaataaggaggaagtttatagctataagtgcctacatcagaaaag

SEQ ID NO: 55070 - DNA, 80 bp, synthetic construct; identical to SEQ ID NO: 14456
  source 1..80: mol_type = other DNA

SEQ ID NO: 55071 - DNA, 80 bp, synthetic construct
  source 1..80: mol_type = other DNA
tcaaaacctaaaaagatcaataacaacaagatcaaagtcacaataaacagtctaccagtaaataaattccaggacctgat

SEQ ID NO: 55072 - DNA, 80 bp, synthetic construct
  source 1..80: mol_type = other DNA
aaccagacaaagacacataaaaaaaacctgtaggccaatatctctgatgaatattgatgcaaaaatcctcaacaaaatat

SEQ ID NO: 55073 - DNA, 80 bp, synthetic construct
  source 1..80: mol_type = other DNA
aaaaaagcatttgataaaatttaacatcatttcatgttaaaaattctcaaaaactggggatataaagaacatacttcaac

SEQ ID NO: 55074 - DNA, 80 bp, synthetic construct; identical to SEQ ID NO: 14457
  source 1..80: mol_type = other DNA

SEQ ID NO: 55075 - DNA, 80 bp, synthetic construct
  source 1..80: mol_type = other DNA
acaaaatgaaatacctaggaattaacttgaccaatgaagtgaaaaatctctataataaaagaaattgaggaataagaaat

SEQ ID NO: 55076 - DNA, 80 bp, synthetic construct
  source 1..80: mol_type = other DNA
aaaatgtccatactacccaaagcaatctacagattcaacacaatcactatcaaacaaccaatgacatttctcacagaaat

SEQ ID NO: 55077 - DNA, 80 bp, synthetic construct
  source 1..80: mol_type = other DNA
atagaccagtggaatggactagagaacccagaagcaaatccacaagcctacagtgcactcatttttgacaaaagtgccaa

SEQ ID NO: 55078 - DNA, 80 bp, synthetic construct; identical to SEQ ID NO: 14458
  source 1..80: mol_type = other DNA

SEQ ID NO: 55079 - DNA, 80 bp, synthetic construct
  source 1..80: mol_type = other DNA
attcaaacaactctataggaaaaaactaataatccaatcaaaagttgggcaaaagatttgaatagatgtttctcaaaata

SEQ ID NO: 55080 - DNA, 80 bp, synthetic construct
  source 1..80: mol_type = other DNA
aaagaacacttggacactattggtgggaacgtaaattagtacaactactatggagaacaatttggaggttcttcaaaaaa

SEQ ID NO: 55081 - DNA, 80 bp, synthetic construct
  source 1..80: mol_type = other DNA
gagatccagtcatttgcaacaacaggcatggcagttccataagtgaaataagctaggcacagaaagacaaatatcgcatg

SEQ ID NO: 55082 - DNA, 80 bp, synthetic construct; identical to SEQ ID NO: 14459
  source 1..80: mol_type = other DNA

SEQ ID NO: 55083 - DNA, 80 bp, synthetic construct
  source 1..80: mol_type = other DNA
aattagagcccacacatcccatatacatacttcccatattaaagcccaaacatctcatataaacactttattatttgaaa

SEQ ID NO: 55084 - DNA, 80 bp, synthetic construct
  source 1..80: mol_type = other DNA
aatccacactcatgatcttcctctgtatgttaaataaatcagagccatcgtgagagcatgtcatcatggggaacacaagt

SEQ ID NO: 55085 - DNA, 80 bp, synthetic construct
  source 1..80: mol_type = other DNA
tgtcatcttcattattttatatatctctgctttcagattcacatagtacaaaatggtccctgccaagatgttctcaattc

SEQ ID NO: 55086 - DNA, 80 bp, synthetic construct; identical to SEQ ID NO: 14460
  source 1..80: mol_type = other DNA

SEQ ID NO: 55087 - DNA, 80 bp, synthetic construct
  source 1..80: mol_type = other DNA
ttctgattttgaaattagcctgccactgtttgcatggaaatttactactggtaagcccttgtttctctatccccttactc

SEQ ID NO: 55088 - DNA, 80 bp, synthetic construct
  source 1..80: mol_type = other DNA
accttgctgactattttatctggaatagtacatagcacttagtaggagctaaataattatttgacaaatgaatggataca

SEQ ID NO: 55089 - DNA, 80 bp, synthetic construct
  source 1..80: mol_type = other DNA
atttctccacttggtgttttgctcaacaaatgaaagtgcctttgaatattcacatttggtcctccaaaaccacatcagct

SEQ ID NO: 55090 - DNA, 80 bp, synthetic construct; identical to SEQ ID NO: 14461
  source 1..80: mol_type = other DNA

SEQ ID NO: 55091 - DNA, 80 bp, synthetic construct
  source 1..80: mol_type = other DNA
ccttctttgcttttctaaacagtatttatgtatttcaactttttaaagtttaaatataatatacttaagtgtaggttgtt

SEQ ID NO: 55092 - DNA, 80 bp, synthetic construct
  source 1..80: mol_type = other DNA
agcagcttcgtcaggcatgcacaccccctttagcagttttacagcagagagtgaccaccaccaccccacttccatgaacc

SEQ ID NO: 55093 - DNA, 80 bp, synthetic construct
  source 1..80: mol_type = other DNA
tggaaagaaaactggagaaggctccttcttgggtgctctatcttaacctaggtgatgggttaatatcgagtgtcaacttg

SEQ ID NO: 55094 - DNA, 80 bp, synthetic construct; identical to SEQ ID NO: 14462
  source 1..80: mol_type = other DNA

SEQ ID NO: 55095 - DNA, 80 bp, synthetic construct
  source 1..80: mol_type = other DNA
agtcaacacgctttaataaactcccctttatacatacatctatcatattagttctatccctctagataaccctgactaat

SEQ ID NO: 55096 - DNA, 80 bp, synthetic construct
  source 1..80: mol_type = other DNA
tacattactgtgtgatttcctctctctcctgactagacccatacttataaacccataaaatttcattcaggcacgaatct

SEQ ID NO: 55097 - DNA, 80 bp, synthetic construct
  source 1..80: mol_type = other DNA
aacaatgaagagaatcccaagatgacatctgctcagcagtcctggaaatcatttcttttagattgaaactagagaactaa

SEQ ID NO: 55098 - DNA, 80 bp, synthetic construct; identical to SEQ ID NO: 14463
  source 1..80: mol_type = other DNA

SEQ ID NO: 55099 - DNA, 80 bp, synthetic construct
  source 1..80: mol_type = other DNA
ttaaaaatacagggattggccgggcgcggtggctcacgcctgtaatcccagcactttgggaggccaaggcgggcggatca

SEQ ID NO: 55100 - DNA, 80 bp, synthetic construct
  source 1..80: mol_type = other DNA
ttgcagtgagccagtcgcgccactgcactccagcctgggggacagagcgagactctgtctcaaaaataaataaataaata

SEQ ID NO: 55101 - DNA, 80 bp, synthetic construct
  source 1..80: mol_type = other DNA
tgtctaaattaatacccccacatacaaaaacatacgcatattactgttaaagtcattgaactggggataatgacagtgga

SEQ ID NO: 55102 - DNA, 80 bp, synthetic construct; identical to SEQ ID NO: 14464
  source 1..80: mol_type = other DNA

SEQ ID NO: 55103 - DNA, 80 bp, synthetic construct
  source 1..80: mol_type = other DNA
catgcttctttgcttctcaaacatccaaaactgcatctcagattgcatcatattctgagcacatggaaggaagagtacgg

SEQ ID NO: 55104 - DNA, 80 bp, synthetic construct
  source 1..80: mol_type = other DNA
gctgtccatgtcctcctaaaacaagaaccttgaacttcttccagtagtatagaatccgtgtcctttagcacagttctaca

SEQ ID NO: 55105 - DNA, 80 bp, synthetic construct
  source 1..80: mol_type = other DNA
attccctactatctatctactcctcacagcttctgctcagattgtcttctctccattgtctcttccatctccctgtacaa

SEQ ID NO: 55106 - DNA, 80 bp, synthetic construct
  source 1..80: mol_type = other DNA
cagtctggttctcgtccttttatgtgtaaactgtttatttccttcttggaagccaatagatcatttttattaccatttta

SEQ ID NO: 55107 - DNA, 80 bp, synthetic construct; identical to SEQ ID NO: 14465
  source 1..80: mol_type = other DNA

SEQ ID NO: 55108 - DNA, 80 bp, synthetic construct
  source 1..80: mol_type = other DNA
tttcttcattatgctcaagaatgagagcaatttaaaatgaaatcattttaacctgtctcctcagagacaagttctgttgg

SEQ ID NO: 55109 - DNA, 80 bp, synthetic construct
  source 1..80: mol_type = other DNA
ggctagttcttccaagtctgtttccccctagtatgcagcctatggtgtctctgctaagtttgtttaataatttttgtttt

SEQ ID NO: 55110 - DNA, 80 bp, synthetic construct
  source 1..80: mol_type = other DNA
ctttacaggtatgtcccaatttttactttctgccttcacatgtccttatattcagccaggtctctcctgagcaggcttaa

SEQ ID NO: 55111 - DNA, 80 bp, synthetic construct; identical to SEQ ID NO: 14466
  source 1..80: mol_type = other DNA

SEQ ID NO: 55112 - DNA, 80 bp, synthetic construct
  source 1..80: mol_type = other DNA
ttgaggtgaaggaagttggtgaaagcatactctggccaaaataatactgattttgctgtttttattaggattcagtttag

SEQ ID NO: 55113 - DNA, 80 bp, synthetic construct
  source 1..80: mol_type = other DNA
gtcaatttccagagtctttaaatgattgtttttggcaacgttgtccaatgttctcactgctttttagattcgttgaaatg

SEQ ID NO: 55114 - DNA, 80 bp, synthetic construct
  source 1..80: mol_type = other DNA
ctttttcattatgaaaaatttatctccagtaatattccttatttgtaaagttttctttgtctgatattaatgtagccact

SEQ ID NO: 55115 - DNA, 80 bp, synthetic construct
  source 1..80: mol_type = other DNA
aagtctacccccttgctgctttttgtttttggtccatctgttctttttctcttattcctctttacttgcctttcttagta

SEQ ID NO: 55116 - DNA, 80 bp, synthetic construct; identical to SEQ ID NO: 14467
  source 1..80: mol_type = other DNA

SEQ ID NO: 55117 - DNA, 80 bp, synthetic construct
  source 1..80: mol_type = other DNA
tctcaggggaaactcacagtaaacgttgaactcacctagttactttccttttctcaatatttatctcctgatgtattctg

SEQ ID NO: 55118 - DNA, 80 bp, synthetic construct
  source 1..80: mol_type = other DNA
aggatcttagacttttgacattcccatagcaatgagcacacttaacacacagatcttgatctagctttttaaccagactc

SEQ ID NO: 55119 - DNA, 80 bp, synthetic construct
  source 1..80: mol_type = other DNA
gaggtcaggagatcgacaacatcctggctaacacggtgaaaccccgcctctactaaaaaatacaaaaaaaaaaattgccg

SEQ ID NO: 55120 - DNA, 80 bp, synthetic construct; identical to SEQ ID NO: 14468
  source 1..80: mol_type = other DNA

SEQ ID NO: 55121 - DNA, 80 bp, synthetic construct
  source 1..80: mol_type = other DNA
cataagaagaacataacttttctaaatatgtatgcatctaataatatgacttaaaaataaatgatacaaaaattgacaga

SEQ ID NO: 55122 - DNA, 80 bp, synthetic construct
  source 1..80: mol_type = other DNA
ctagaatatgcaatggcaaaatacatattatttcaggtgtacatgaaatatccatcaagatgaacaacatactggatcat

SEQ ID NO: 55123 - DNA, 80 bp, synthetic construct
  source 1..80: mol_type = other DNA
gaaatcccctaaatatacagaaattaatcaacatactaccaaataagccataggtctaagaggaaattacaaagaaaatt

SEQ ID NO: 55124 - DNA, 80 bp, synthetic construct; identical to SEQ ID NO: 14469
  source 1..80: mol_type = other DNA

SEQ ID NO: 55125 - DNA, 80 bp, synthetic construct
  source 1..80: mol_type = other DNA
aacaccgcatgttctcactcataagtgggagttgaacaatgagagtacatatccaagtctcacatgtctcaacaatgaga

SEQ ID NO: 55126 - DNA, 80 bp, synthetic construct
  source 1..80: mol_type = other DNA
caaacctgcatgttgagcacatgtatcccagaacttaaagtaaaataaataaaaaaaagaaatgattaaatgtggcaaag

SEQ ID NO: 55127 - DNA, 80 bp, synthetic construct
  source 1..80: mol_type = other DNA
ttctcctgcttcagccttcccaagtagctgggattataggcatgcgccaccatgcccggctaattttgtatttttagtag

SEQ ID NO: 55128 - DNA, 80 bp, synthetic construct; identical to SEQ ID NO: 14470
  source 1..80: mol_type = other DNA

SEQ ID NO: 55129 - DNA, 80 bp, synthetic construct
  source 1..80: mol_type = other DNA
agtaattgaaactcctgatgcaagtaatacagacgtatttaggagagatacttctaaagggttcaggggaagaatacctg

SEQ ID NO: 55130 - DNA, 80 bp, synthetic construct
  source 1..80: mol_type = other DNA
aggtcttttaggacaattgttgtgtggtggccttggaatatactttctcggacaatatcacgtcatcactgatgtatagt

SEQ ID NO: 55131 - DNA, 80 bp, synthetic construct
  source 1..80: mol_type = other DNA
tacagctatatggtaggcaagtgtttggtgggtcattatgtattatcatgcaaataaagacttactaatagtgtgaagac

SEQ ID NO: 55132 - DNA, 80 bp, synthetic construct
  source 1..80: mol_type = other DNA
aattatttcaaacctattacaactccctacaatgcttcaagccccaaggccccggcattggagggcctataactaaacac

SEQ ID NO: 55133 - DNA, 80 bp, synthetic construct; identical to SEQ ID NO: 14471
  source 1..80: mol_type = other DNA

SEQ ID NO: 55134 - DNA, 80 bp, synthetic construct
  source 1..80: mol_type = other DNA
catctggagtaaggaactgcaggaaagaaacaacatccaatctttaacacacttattctctttccatatctctgcctgta

SEQ ID NO: 55135 - DNA, 80 bp, synthetic construct
  source 1..80: mol_type = other DNA
atcaacctttgtctatcccatccatccaatatgttaggaaaaggagagccatccacatcattccttaatggctgccttgg

SEQ ID NO: 55136 - DNA, 80 bp, synthetic construct
  source 1..80: mol_type = other DNA
gagactagatcttataatggttgaaagagagggcatctgcctctaactgggtgaggaaagttgtttctatctcaaccagt

SEQ ID NO: 55137 - DNA, 80 bp, synthetic construct; identical to SEQ ID NO: 14472
  source 1..80: mol_type = other DNA

SEQ ID NO: 55138 - DNA, 80 bp, synthetic construct
  source 1..80: mol_type = other DNA
gattgacagagcaggagcatcgccattttggacatgcaccaccattttaaagttccccttgatcaaaagccacctaaatc

SEQ ID NO: 55139 - DNA, 80 bp, synthetic construct
  source 1..80: mol_type = other DNA
ccaagataacctcccctccaaccagagacattccaaccccacaataaacttcttctccacacagaaacattcaagccttt

SEQ ID NO: 55140 - DNA, 80 bp, synthetic construct
  source 1..80: mol_type = other DNA
ttgtgtttctttcctctttctttaactctttttttttttttatgcatttatgttttatatacactttatacatatagcag

SEQ ID NO: 55141 - DNA, 80 bp, synthetic construct
  source 1..80: mol_type = other DNA
gtgtcatctagcattaggtatatctcccaatgctatccctcccccctcccccgaccccaccacagtccccagagtgtgat

SEQ ID NO: 55142 - DNA, 80 bp, synthetic construct; identical to SEQ ID NO: 14473
  source 1..80: mol_type = other DNA

SEQ ID NO: 55143 - DNA, 80 bp, synthetic construct
  source 1..80: mol_type = other DNA
atgcaatgtaatcctttagtaaccacaaagtaggttgttgagaggacccatgatgtaatacatataaaacacttagacct

SEQ ID NO: 55144 - DNA, 80 bp, synthetic construct
  source 1..80: mol_type = other DNA
atgcccaaactctgggaaccaagtgtggcttacactgaacatcatttttgcttaaacttgttagtcttatacatctttac

SEQ ID NO: 55145 - DNA, 80 bp, synthetic construct
  source 1..80: mol_type = other DNA
ttccttccttccttccttccttccttccttccttccttccttctctccttaattgtgggaaaatataaataaactaaaac

SEQ ID NO: 55146 - DNA, 80 bp, synthetic construct
  source 1..80: mol_type = other DNA
gtgaccaccattctactttctgtctctgtttgatcactcaaggtggtctcataaggtagaatcatacaatatctgccttt

SEQ ID NO: 55147 - DNA, 80 bp, synthetic construct; identical to SEQ ID NO: 14474
  source 1..80: mol_type = other DNA

SEQ ID NO: 55148 - DNA, 80 bp, synthetic construct
  source 1..80: mol_type = other DNA
cagcaacacttatattctcttttttccttttgaataatagccatcctaacgtgtgtatgcacaactacacataaaaaaag

SEQ ID NO: 55149 - DNA, 80 bp, synthetic construct
  source 1..80: mol_type = other DNA
aaggtgcacacacagggcttctgggaagctggataagctttttagtctgtgtcattaattatttattaaactctatatac

SEQ ID NO: 55150 - DNA, 80 bp, synthetic construct
  source 1..80: mol_type = other DNA
actcttcaatcatgagctgaagaatagcaatacaagttgttgattgctcttctggatagaaatccaggataagaaataca

SEQ ID NO: 55151 - DNA, 80 bp, synthetic construct
  source 1..80: mol_type = other DNA
tctgctccatagcaacttcattaaaggacctagtctaagttcaagattaaaaggttatatgaggcatatgtgtatgagca

SEQ ID NO: 55152 - DNA, 80 bp, synthetic construct; identical to SEQ ID NO: 14475
  source 1..80: mol_type = other DNA

SEQ ID NO: 55153 - DNA, 80 bp, synthetic construct
  source 1..80: mol_type = other DNA
atttcacccctgcagataagcattgaaaaaggcatgaatgtgaaagtgtggttttgagtagcttaatcaaaattgttttc

SEQ ID NO: 55154 - DNA, 80 bp, synthetic construct
  source 1..80: mol_type = other DNA
agtggtgagtgaatgaaggtctaggcctttattgtacaccattaagtatttcgtaaacactgtacacagcctacactaaa

SEQ ID NO: 55155 - DNA, 80 bp, synthetic construct
  source 1..80: mol_type = other DNA
aacacaaacacacttagagttatacaaatgtattttctttctctatatctttattgtttaaacttttttctaaacctttt

SEQ ID NO: 55156 - DNA, 80 bp, synthetic construct; identical to SEQ ID NO: 14476
  source 1..80: mol_type = other DNA

SEQ ID NO: 55157 - DNA, 80 bp, synthetic construct
  source 1..80: mol_type = other DNA
cattattgagtattgtgtactgtacataattgtattgctatacttttatgtgactggcagcacaggagatttgtttgcgc

SEQ ID NO: 55158 - DNA, 80 bp, synthetic construct
  source 1..80: mol_type = other DNA
ttccttgactgaactgtcgttatgtggtgcatgattgtattacactgtgagctctgggtcccattaaaattctaggagaa

SEQ ID NO: 55159 - DNA, 80 bp, synthetic construct
  source 1..80: mol_type = other DNA
tggcactaggactgtgatatttgtatcatagttcagctcctaatggctttgatatgctggtgtgaaactgtccccctcgt

SEQ ID NO: 55160 - DNA, 80 bp, synthetic construct; identical to SEQ ID NO: 14477
  source 1..80: mol_type = other DNA

SEQ ID NO: 55161 - DNA, 80 bp, synthetic construct
  source 1..80: mol_type = other DNA
acactcagggaagaactagaagtgaaaaaagaagtaaagttccaaaaaaggaatattgctccacacactctctggagacc

SEQ ID NO: 55162 - DNA, 80 bp, synthetic construct
  source 1..80: mol_type = other DNA
tgacttccctccctaatattcatgctattttgtacttttcaaggtccacagatagctgccttttatattctgcctgatgt

SEQ ID NO: 55163 - DNA, 80 bp, synthetic construct
  source 1..80: mol_type = other DNA
tttgtgttaggtgtagaagttttcttagcgtattttaaggtttcattccattttcctccagattccaaagtttctattga

SEQ ID NO: 55164 - DNA, 80 bp, synthetic construct; identical to SEQ ID NO: 14478
  source 1..80: mol_type = other DNA

SEQ ID NO: 55165 - DNA, 80 bp, synthetic construct
  source 1..80: mol_type = other DNA
tgcctgtgaccagtctgctgttaaattcacccattaagttttaattttagatgatgtactcttatttcttttatttagat

SEQ ID NO: 55166 - DNA, 80 bp, synthetic construct
  source 1..80: mol_type = other DNA
aaaaattgttggtgaggctgttggcattcagagtatcatgggatcaaatatataaaaagctcacaacgttttttattcag

SEQ ID NO: 55167 - DNA, 80 bp, synthetic construct
  source 1..80: mol_type = other DNA
gggaaacagaaaaggaagtacttttcaaagggaagagcacagaattctgaggacaggtagactaatgagaaactcccaag

SEQ ID NO: 55168 - DNA, 80 bp, synthetic construct; identical to SEQ ID NO: 14479
  source 1..80: mol_type = other DNA

SEQ ID NO: 55169 - DNA, 80 bp, synthetic construct
  source 1..80: mol_type = other DNA
gtggcacgcgcctgtagtcccagctattcaggaggctgaggcaggagaatcacttgaacccagaaggcagaggttgtggt

SEQ ID NO: 55170 - DNA, 80 bp, synthetic construct
  source 1..80: mol_type = other DNA
acggcacacttattttagagaaaacaaacctgagaggcgccttctggccgagttaggtcagaggcacgctctcttataga

SEQ ID NO: 55171 - DNA, 80 bp, synthetic construct
  source 1..80: mol_type = other DNA
tatcttagtgcacctgaagggaaaggaatgtgcttattaaggcccactgttttagggcccattgtatgggggtgaagttt

SEQ ID NO: 55172 - DNA, 80 bp, synthetic construct; identical to SEQ ID NO: 14480
  source 1..80: mol_type = other DNA

SEQ ID NO: 55173 - DNA, 80 bp, synthetic construct
  source 1..80: mol_type = other DNA
gactctaatagattatgatgatgatcctaattcatcatccctccctatatccacgccctttgcaatctaactttactatg

SEQ ID NO: 55174 - DNA, 80 bp, synthetic construct
  source 1..80: mol_type = other DNA
aaggacatttctaggcaagtccaccggccctaagaagaggatgagaggcatgtgaagaagagtccaccttggatacatag

SEQ ID NO: 55175 - DNA, 80 bp, synthetic construct
  source 1..80: mol_type = other DNA
ctgttcctgcaccactaaaatatacgtcccatgaggacaggaataattttttctgccttatttctgttgtatctttagta

SEQ ID NO: 55176 - DNA, 80 bp, synthetic construct
  source 1..80: mol_type = other DNA
gtgattctcctgcctcagcctcccaagtagctgggattacaagcatgcaccacaacacctggctaatttttgtattttta

SEQ ID NO: 55177 - DNA, 80 bp, synthetic construct; identical to SEQ ID NO: 14481
  source 1..80: mol_type = other DNA

SEQ ID NO: 55178 - DNA, 80 bp, synthetic construct
  source 1..80: mol_type = other DNA
gctacatgtttttgaaacagaaaaaattcccttgttccccttgcagggagtgcgatgtggctctcttctccagtgcccgc

SEQ ID NO: 55179 - DNA, 80 bp, synthetic construct
  source 1..80: mol_type = other DNA
gctagggtctcaggtttttataggcagaggatggggcatggcaggccagagtggtcttgggaaatgcaacatttggacag

SEQ ID NO: 55180 - DNA, 80 bp, synthetic construct
  source 1..80: mol_type = other DNA
aagtagctacactaggatttgcctgacttccagaaggaaagagattcatctttccttggcaatcgacgtagaccaaaagt

SEQ ID NO: 55181 - DNA, 80 bp, synthetic construct
  source 1..80: mol_type = other DNA
gagtgtggattctcaaagaattcatgaaaatgttcacaatggagtcttcttatgcatctgttttccctagagcattcaat

SEQ ID NO: 55182 - DNA, 80 bp, synthetic construct; identical to SEQ ID NO: 14482
  source 1..80: mol_type = other DNA

SEQ ID NO: 55183 - DNA, 80 bp, synthetic construct
  source 1..80: mol_type = other DNA
gtttagatgttcaatatattcttttttaataaagaaaagtttatttggctaatgattttcaggttgtacaagaagcatgg

SEQ ID NO: 55184 - DNA, 80 bp, synthetic construct
  source 1..80: mol_type = other DNA
gtgtgagaagatgtttaacatattctaataagatattcctaataaactgccatgagataactgctgtattagtctgttgt

SEQ ID NO: 55185 - DNA, 80 bp, synthetic construct
  source 1..80: mol_type = other DNA
gttcaggggaactcccatttacaaaaccatcagatcttgtgagactattacaagaacagcatgggaaagtcccactcccc

SEQ ID NO: 55186 - DNA, 80 bp, synthetic construct; identical to SEQ ID NO: 14483
  source 1..80: mol_type = other DNA

SEQ ID NO: 55187 - DNA, 80 bp, synthetic construct
  source 1..80: mol_type = other DNA
ttactcttttaatgtaaagatttttgtctgttatggtaatttgacttgttttggtttggtttccgtttgatactgaggat

SEQ ID NO: 55188 - DNA, 80 bp, synthetic construct
  source 1..80: mol_type = other DNA
gcttatttacactgggttttactttggtatggaggtaactcttatccaagtgtggttggttcgaaggacaagtagggatg

SEQ ID NO: 55189 - DNA, 80 bp, synthetic construct
  source 1..80: mol_type = other DNA
agaagtagttacttatttagcatgtgtattaattactatatgattagttcagtgtcatctgactaaaatggagattaatg

SEQ ID NO: 55190 - DNA, 80 bp, synthetic construct; identical to SEQ ID NO: 14484
  source 1..80: mol_type = other DNA

SEQ ID NO: 55191 - DNA, 80 bp, synthetic construct
  source 1..80: mol_type = other DNA
ttattgagagacaaaaagaatgttatattgtggaataagtaaaaccatagagaaaaacacattgtagaagagctacttgg

SEQ ID NO: 55192 - DNA, 80 bp, synthetic construct
  source 1..80: mol_type = other DNA
cttaaaatatggaataagcgacaggcatgtcaattatttctccttggcactggattaacaaaaatttgttgttggtggtg

SEQ ID NO: 55193 - DNA, 80 bp, synthetic construct
  source 1..80: mol_type = other DNA
gttactaagaaaaatgcaggagaaggtttgagtgtccctattcccatatgtagtggattgtcacgaaacatacctctcaa

SEQ ID NO: 55194 - DNA, 80 bp, synthetic construct; identical to SEQ ID NO: 14485
  source 1..80: mol_type = other DNA

SEQ ID NO: 55195 - DNA, 80 bp, synthetic construct
  source 1..80: mol_type = other DNA
tggtttccttggttgcccgattcagttccttctattgtcctcatgattctctaggctatgttaaggtctgtaataaactc

SEQ ID NO: 55196 - DNA, 80 bp, synthetic construct
  source 1..80: mol_type = other DNA
ttggcactatatgtaggaatatggattctgggtgtctgttttcagtgatcattattaccttgatcagagagagtcctcag

SEQ ID NO: 55197 - DNA, 80 bp, synthetic construct
  source 1..80: mol_type = other DNA
ttcagcacactgagtcccaatgggtaactgattgcctctttattttttcatggagaaccagaacagaatggaagacttga

SEQ ID NO: 55198 - DNA, 80 bp, synthetic construct
  source 1..80: mol_type = other DNA
aagacaaagccttagaataagaacttcaatattggcagatctggtaggctcaaaaacaaaacaagaacggcagctataac

SEQ ID NO: 55199 - DNA, 80 bp, synthetic construct; identical to SEQ ID NO: 14486
  source 1..80: mol_type = other DNA

SEQ ID NO: 55200 - DNA, 80 bp, synthetic construct
  source 1..80: mol_type = other DNA
caccactaccactatatatgtgttaatggacaaaaatagccaagaaaattttgcaaaggaaaatcacgaacgaggaagag

SEQ ID NO: 55201 - DNA, 80 bp, synthetic construct
  source 1..80: mol_type = other DNA
acttaatatttatttattaagcagtgttctaggtacttagaatattgctgaacaaaatagacaaggtgtctcttttgatt

SEQ ID NO: 55202 - DNA, 80 bp, synthetic construct
  source 1..80: mol_type = other DNA
ttggttcaactggcatatttcatttcttcagtaaacaagctgatgcccatgacatgccaatagctcacagctgttctttg

SEQ ID NO: 55203 - DNA, 80 bp, synthetic construct; identical to SEQ ID NO: 14487
  source 1..80: mol_type = other DNA

SEQ ID NO: 55204 - DNA, 80 bp, synthetic construct
  source 1..80: mol_type = other DNA
acctaaaactctaaacaacagacacattcaccaagtgaagccttggttctatgtcaacatattgccaaacaaatatacat

SEQ ID NO: 55205 - DNA, 80 bp, synthetic construct
  source 1..80: mol_type = other DNA
tgaagaaaattaatatttaataaagagtaactgagtggcaactccaaatttggtcatcaggaaaatcttaggttatattt

SEQ ID NO: 55206 - DNA, 80 bp, synthetic construct
  source 1..80: mol_type = other DNA
ttccaccaaaatttgttcactcctcctcctgcttagcaatattgctcagaaatggcagtccaagtaaggactccactttc

SEQ ID NO: 55207 - DNA, 80 bp, synthetic construct; identical to SEQ ID NO: 14488
  source 1..80: mol_type = other DNA

SEQ ID NO: 55208 - DNA, 80 bp, synthetic construct
  source 1..80: mol_type = other DNA
ttaaaaggtagacagtgaactcagtattatgggcaaagagcagatcacagaagatttcattagccaggcagaagatttga

SEQ ID NO: 55209 - DNA, 80 bp, synthetic construct
  source 1..80: mol_type = other DNA
ggtgggaggctatttcaacaattcaggaggaaaatggcagtatcttaaagtcaagtggctacaaagaagatgaataaaat

SEQ ID NO: 55210 - DNA, 80 bp, synthetic construct
  source 1..80: mol_type = other DNA
gtggaagacgctaaaggcaagatactcccacacatttgaagttgtagataggtaggatctagtatttcataattgtccaa

SEQ ID NO: 55211 - DNA, 80 bp, synthetic construct; identical to SEQ ID NO: 14489
  source 1..80: mol_type = other DNA

SEQ ID NO: 55212 - DNA, 80 bp, synthetic construct
  source 1..80: mol_type = other DNA
tttcacctagcctttcgaatacctcatcacattgggcagaagtgatagttgattgtggtttcattgtggttatgttatta

SEQ ID NO: 55213 - DNA, 80 bp, synthetic construct
  source 1..80: mol_type = other DNA
aatgaagcttcagttgtataagaactacacatattctacttaaagggtgcatcttctgaattttttaatgtgaaaaggaa

SEQ ID NO: 55214 - DNA, 80 bp, synthetic construct
  source 1..80: mol_type = other DNA
ccacctttgtttaggaaaaagaaaatctgtattcctgacacagaagtgggttcaaatctaaggcctggctaatcagagtc

SEQ ID NO: 55215 - DNA, 80 bp, synthetic construct
  source 1..80: mol_type = other DNA
gctgacatgtttgatctgttgctattcagatgatgagctgaaaatatgagatgtccatcttcatagccatgtaggaaatg

SEQ ID NO: 55216 - DNA, 80 bp, synthetic construct; identical to SEQ ID NO: 14490
  source 1..80: mol_type = other DNA

SEQ ID NO: 55217 - DNA, 80 bp, synthetic construct
  source 1..80: mol_type = other DNA
gggaaaatgcaaatcgaagaaagacagaaaactatcaaatatattaatggggaggaggtctttcagacagagatagaaaa

SEQ ID NO: 55218 - DNA, 80 bp, synthetic construct
  source 1..80: mol_type = other DNA
agggaactgaaagagaagagagaaaaaggtttcatttgtgtccagtatctaagcatttttcagaagctaaattcacctag

SEQ ID NO: 55219 - DNA, 80 bp, synthetic construct
  source 1..80: mol_type = other DNA
gccctgaagaacacattgtactcaccagaagatatttgtggtgccatttggttaagttacggtattaggtaccatgagtg

SEQ ID NO: 55220 - DNA, 80 bp, synthetic construct; identical to SEQ ID NO: 14491
  source 1..80: mol_type = other DNA

SEQ ID NO: 55221 - DNA, 80 bp, synthetic construct
  source 1..80: mol_type = other DNA
cagaaacagaagaaggtagtaaaagcttatgaaagtatttatggtccaaacagggacagcagacagcagagagcagagct

SEQ ID NO: 55222 - DNA, 80 bp, synthetic construct
  source 1..80: mol_type = other DNA
tgacagaagaggggctgggaattacagacaaaagtaaagtcaagacaagacaagaaagaggtaacagattccagaaagaa

SEQ ID NO: 55223 - DNA, 80 bp, synthetic construct
  source 1..80: mol_type = other DNA
tttcctggtaactgagtagagatggcaacaggaatgcctcattttattgtgctatgttttgttgtgcttctcaaatattg

SEQ ID NO: 55224 - DNA, 80 bp, synthetic construct; identical to SEQ ID NO: 14492
  source 1..80: mol_type = other DNA

SEQ ID NO: 55225 - DNA, 80 bp, synthetic construct
  source 1..80: mol_type = other DNA
tagacatcattaagcgtagtgaagaagacatgtcaaaagccaagatgggctaaaatctaggtctcttgctttcaacaatt

SEQ ID NO: 55226 - DNA, 80 bp, synthetic construct
  source 1..80: mol_type = other DNA
agccaaagtctaatccagagaaaggccctcattctctttagttctatgaaggccaagagatgtgaggaagctgcagaaaa

SEQ ID NO: 55227 - DNA, 80 bp, synthetic construct
  source 1..80: mol_type = other DNA
tcatagattttcaatagagatgaaacagccttctattggaagaaggtgtcttctaggattttcagagttagagagaagtc

SEQ ID NO: 55228 - DNA, 80 bp, synthetic construct; identical to SEQ ID NO: 14493
  source 1..80: mol_type = other DNA

SEQ ID NO: 55229 - DNA, 80 bp, synthetic construct
  source 1..80: mol_type = other DNA
caagtcttattatttaatacattatgtaaggctattgctgtcagagacagtgattcctctgatggatctggggaaagcaa

SEQ ID NO: 55230 - DNA, 80 bp, synthetic construct
  source 1..80: mol_type = other DNA
catgaatgactttgagatgtttaagacttcagtggaggaaggaactgtagatgtcatggaaatagcaagagaactcaaat

SEQ ID NO: 55231 - DNA, 80 bp, synthetic construct
  source 1..80: mol_type = other DNA
ctggtgaagatgctgtgaatgttgttgaagtggcaacaaaggatttagaatattacataacttagttgagaaagcagtag

SEQ ID NO: 55232 - DNA, 80 bp, synthetic construct; identical to SEQ ID NO: 14494
  source 1..80: mol_type = other DNA

SEQ ID NO: 55233 - DNA, 80 bp, synthetic construct
  source 1..80: mol_type = other DNA
ctctggaaccaaaatcgcaatatatctgaagtgcactttactctgttaaagtgaacacaaaacatcagcttgaaggggcc

SEQ ID NO: 55234 - DNA, 80 bp, synthetic construct
  source 1..80: mol_type = other DNA
aatgactgataccacaggttggatcttattctgaggaataatccctgaagtttagagcagagacttttcagaatgttcca

SEQ ID NO: 55235 - DNA, 80 bp, synthetic construct
  source 1..80: mol_type = other DNA
ttttccaccttatgtgtgtcatatttctgggcaaggagagcagggatcttatctgtgaccagagccctgtctatttaaga

SEQ ID NO: 55236 - DNA, 80 bp, synthetic construct; identical to SEQ ID NO: 14495
  source 1..80: mol_type = other DNA

SEQ ID NO: 55237 - DNA, 80 bp, synthetic construct
  source 1..80: mol_type = other DNA
gacagaggtagtctgtcaccaagcaaaggagatgacaggcaggcaaagaccccaaggggcagcatggatggatgaggagg

SEQ ID NO: 55238 - DNA, 80 bp, synthetic construct
  source 1..80: mol_type = other DNA
gggccaccataataacctgggagaaaaggagttcagttctcagcaagtgcattttgacttgagacaatgggatctcagtc

SEQ ID NO: 55239 - DNA, 80 bp, synthetic construct
  source 1..80: mol_type = other DNA
ccacccttccttttttccattgaatctatgatataaataaagtgctccttacgtcattctaccgtgatggggctctggag

SEQ ID NO: 55240 - DNA, 80 bp, synthetic construct; identical to SEQ ID NO: 14496
  source 1..80: mol_type = other DNA

SEQ ID NO: 55241 - DNA, 80 bp, synthetic construct
  source 1..80: mol_type = other DNA
aattagtcttctactccaatcccagatctaggttttaattagctaacttgttagcctactctttagaaaagaaatatttt

SEQ ID NO: 55242 - DNA, 80 bp, synthetic construct
  source 1..80: mol_type = other DNA
atgtgtaactatgtgtgattttttataaaacaaagatcttcatgtttaaataaatctttagctccattattcacaggttg

SEQ ID NO: 55243 - DNA, 80 bp, synthetic construct; identical to SEQ ID NO: 14497
  source 1..80: mol_type = other DNA

SEQ ID NO: 55244 - DNA, 80 bp, synthetic construct
  source 1..80: mol_type = other DNA
gttgttttttttcttgtaaatttgtttaaattccttgtagattctggatattaaccctttgtcaaatggatagattgcaa

SEQ ID NO: 55245 - DNA, 80 bp, synthetic construct
  source 1..80: mol_type = other DNA
ctgactggtattgcctaggttttcttctagggtttttatggttttaggttttatgtgtaagtctttaatccatcttgagt

SEQ ID NO: 55246 - DNA, 80 bp, synthetic construct
  source 1..80: mol_type = other DNA
gagtcaggtgatgcaaaggggtcaccataaaaacctgggagaaaaggaggtcagttctcagtaagtccttttgacttaag

SEQ ID NO: 55247 - DNA, 80 bp, synthetic construct; identical to SEQ ID NO: 14498
  source 1..80: mol_type = other DNA

SEQ ID NO: 55248 - DNA, 80 bp, synthetic construct
  source 1..80: mol_type = other DNA
gccagtatggccattatcacaatactgattcttcctatccatgagcatggaatatttttccatttgtttgtgtcctctct

SEQ ID NO: 55249 - DNA, 80 bp, synthetic construct
  source 1..80: mol_type = other DNA
tgtgctttttgcacattgattttgtattctgagactgctgaaattgcttgtcagcttaaggagattttgggctgagatga

SEQ ID NO: 55250 - DNA, 80 bp, synthetic construct
  source 1..80: mol_type = other DNA
tgtaaattagttcaaccattgtggaagacagtgtggcgattcttcaaggatatagtaccagaaatatcatttgacccagc

SEQ ID NO: 55251 - DNA, 80 bp, synthetic construct; identical to SEQ ID NO: 14499
  source 1..80: mol_type = other DNA

SEQ ID NO: 55252 - DNA, 80 bp, synthetic construct
  source 1..80: mol_type = other DNA
tattctaagtagtaagactacgtgatgaaccaataaaaaataataactacaacaacttttcaagacatagtacaataaga

SEQ ID NO: 55253 - DNA, 80 bp, synthetic construct
  source 1..80: mol_type = other DNA
ttatagttcaattgtgccatttttactgtctgatcttctttatcacttaattggtgtgtctaggccaattatacctatga

SEQ ID NO: 55254 - DNA, 80 bp, synthetic construct
  source 1..80: mol_type = other DNA
gtatgctccaaatttctctctctctcattcattgtgcaattgttatcatatattatacttttttatattccataaacaca

SEQ ID NO: 55255 - DNA, 80 bp, synthetic construct; identical to SEQ ID NO: 14500
  source 1..80: mol_type = other DNA

SEQ ID NO: 55256 - DNA, 80 bp, synthetic construct
  source 1..80: mol_type = other DNA
tgactactgggaaacagataatattcctcacgcctaatagcaattgattcttttcctaggaactctccaatcctaatgta

SEQ ID NO: 55257 - DNA, 80 bp, synthetic construct
  source 1..80: mol_type = other DNA
accatttgcggcagggaggagactgacccctcttctttgggtggaacgtggaattcaatctgtgaggtgggaagcccact

SEQ ID NO: 55258 - DNA, 80 bp, synthetic construct
  source 1..80: mol_type = other DNA
aactaaggaaaagtcctgtaacactatgtttcccaggctggcctcaaactccttggctcaagtgatcttcctacctcagt

SEQ ID NO: 55259 - DNA, 80 bp, synthetic construct; identical to SEQ ID NO: 14501
  source 1..80: mol_type = other DNA

SEQ ID NO: 55260 - DNA, 80 bp, synthetic construct
  source 1..80: mol_type = other DNA
ctctaaaagtatcccattgactaaagaagattggcaaggacaatcttgcacctgagagatggtggagcttgaaaggctta

SEQ ID NO: 55261 - DNA, 80 bp, synthetic construct
  source 1..80: mol_type = other DNA
atattggtgtccatgggatttatgcaccataagaaatgtaaaaggaagaccttcacacggtagccatatgatatcacata

SEQ ID NO: 55262 - DNA, 80 bp, synthetic construct
  source 1..80: mol_type = other DNA
tctcaacctcagaactgttggcattttgtttcaggtgattattttcttgtaggaggctgccatgtgcattgcaggatgtg

SEQ ID NO: 55263 - DNA, 80 bp, synthetic construct
  source 1..80: mol_type = other DNA
cgttgttggaagtcattaagttttggaatagtttgttacatagaaaaatctgacagatacaacagtcttcaaagaaattc

SEQ ID NO: 55264 - DNA, 80 bp, synthetic construct; identical to SEQ ID NO: 14502
  source 1..80: mol_type = other DNA

SEQ ID NO: 55265 - DNA, 80 bp, synthetic construct
  source 1..80: mol_type = other DNA
ttttgctattctagactctgttattgttgtgaagcacctttaactactgcaagatagaagtcttggccttcagagtaaaa

SEQ ID NO: 55266 - DNA, 80 bp, synthetic construct
  source 1..80: mol_type = other DNA
catgtcaattagtgctttctaagaaagttattagacaaagtagtattttgagctccaaattttattcccactattacttt

SEQ ID NO: 55267 - DNA, 80 bp, synthetic construct
  source 1..80: mol_type = other DNA
tcagcctcccgagtagtagctgggactacaggcgcgtgccactacacccagctaatttttttttgttttttgttttttgt

SEQ ID NO: 55268 - DNA, 80 bp, synthetic construct; identical to SEQ ID NO: 14503
  source 1..80: mol_type = other DNA

SEQ ID NO: 55269 - DNA, 80 bp, synthetic construct
  source 1..80: mol_type = other DNA
tacaattctgatcccacatttaacaccctaacttcctaattagagttgagttttttaaactgtgatattaataggggaaa

SEQ ID NO: 55270 - DNA, 80 bp, synthetic construct
  source 1..80: mol_type = other DNA
caactgcaacctcaaaaaccctcttagttcacaatggcagtggctagaaagagtaaaaaggccacgtacagtgtcatata

SEQ ID NO: 55271 - DNA, 80 bp, synthetic construct
  source 1..80: mol_type = other DNA
gtgaccctgggaaaagtcctttacctctctgagttttaatgtcctccttgaaaaatgtggatgatactaaagtatgacaa

SEQ ID NO: 55272 - DNA, 80 bp, synthetic construct; identical to SEQ ID NO: 14504
  source 1..80: mol_type = other DNA

SEQ ID NO: 55273 - DNA, 80 bp, synthetic construct
  source 1..80: mol_type = other DNA
gctcttaagacttttcaactgcttagactaagctcacccaatttatctcagataaattcttacttaaagttaactgatta

SEQ ID NO: 55274 - DNA, 80 bp, synthetic construct
  source 1..80: mol_type = other DNA
agggacttcatttttaactggattctgacagaaagcagggagtggggatggcaatgctatgattgggtagcttcataaat

SEQ ID NO: 55275 - DNA, 80 bp, synthetic construct
  source 1..80: mol_type = other DNA
gtctcaatccatcgcactcacagagtacctgtctgattctgatgttctatgaaattgattatcttcaacaggagaatcaa

SEQ ID NO: 55276 - DNA, 80 bp, synthetic construct; identical to SEQ ID NO: 14505
  source 1..80: mol_type = other DNA

SEQ ID NO: 55277 - DNA, 80 bp, synthetic construct
  source 1..80: mol_type = other DNA
aacctattttctaagttaaagcaattctccttattctactctcaatatttgacttgacattcttaaattaaaaaaaaaaa

SEQ ID NO: 55278 - DNA, 80 bp, synthetic construct
  source 1..80: mol_type = other DNA
gcctgtagtcccagctactcgggaggctggggcaggagaatggcgtgaacccaggaggcagagcttgcagtgagccgaga

SEQ ID NO: 55279 - DNA, 80 bp, synthetic construct
  source 1..80: mol_type = other DNA
gctccgaaacacagagcataaagattactagaagcaaaacaaaaaactgtgtaaaagatcggttactgtaggcagcaccg

SEQ ID NO: 55280 - DNA, 80 bp, synthetic construct; identical to SEQ ID NO: 14506
  source 1..80: mol_type = other DNA

SEQ ID NO: 55281 - DNA, 80 bp, synthetic construct
  source 1..80: mol_type = other DNA
gatttagtatcttccctttatttatagaaaatttcctcaagaccatgctgtgtggaggatgtgtcagaaccagaggatgt

SEQ ID NO: 55282 - DNA, 80 bp, synthetic construct
  source 1..80: mol_type = other DNA
cagagcagcaactgctgaggctgccttgggaagaagatgatcctaaacaaagctctgctgctgggggccctcgccctgac

SEQ ID NO: 55283 - DNA, 80 bp, synthetic construct
  source 1..80: mol_type = other DNA
tttaaaattatggcagttcctcctttaggaaaccagagctccaaccgactctctttgctacctgtgctattggagtttac

SEQ ID NO: 55284 - DNA, 80 bp, synthetic construct; identical to SEQ ID NO: 14507
  source 1..80: mol_type = other DNA

SEQ ID NO: 55285 - DNA, 80 bp, synthetic construct
  source 1..80: mol_type = other DNA
ggtaaatgtggtacttactctctgctacctcatatatgtcacctcgcttatgatcaaataaaatgggcatgtagatatgc

SEQ ID NO: 55286 - DNA, 80 bp, synthetic construct
  source 1..80: mol_type = other DNA
caacccaaattactagttcttcaccttatctaatgaagtcttataaagagaaaaatgggcaggcacagataattatttgg

SEQ ID NO: 55287 - DNA, 80 bp, synthetic construct
  source 1..80: mol_type = other DNA
aggggaagtgaactggaagctactctaaactttcacaaccttattaaccatggctgctcccattctgattttgtttggca

SEQ ID NO: 55288 - DNA, 80 bp, synthetic construct; identical to SEQ ID NO: 14508
  source 1..80: mol_type = other DNA

SEQ ID NO: 55289 - DNA, 80 bp, synthetic construct
  source 1..80: mol_type = other DNA
ggcgcccgccactgtgcacggctaattttttgtatttttagtagagacggggtttcaccgtgttagccaggatggtctcg

SEQ ID NO: 55290 - DNA, 80 bp, synthetic construct
  source 1..80: mol_type = other DNA
tacaatcagaagctgtaattttccgtatttttatggaggaaggcgcccacaaaagcaacagtgctcggggctcacaagtc

SEQ ID NO: 55291 - DNA, 80 bp, synthetic construct
  source 1..80: mol_type = other DNA
tgtttgagcacacaatgagctaacttttgggaattcaaagataaaaaatcatgctgtctgccttgcagagggtgcacaaa

SEQ ID NO: 55292 - DNA, 80 bp, synthetic construct
  source 1..80: mol_type = other DNA
tcctccagcaacacttagcacccaggacaagtaccagatgaaaagaaggattgcatgtattccacatatattcatgtttg

SEQ ID NO: 55293 - DNA, 80 bp, synthetic construct; identical to SEQ ID NO: 14509
  source 1..80: mol_type = other DNA

SEQ ID NO: 55294 - DNA, 80 bp, synthetic construct
  source 1..80: mol_type = other DNA
ggagaaaaaacagacccttgcaaagacatgaaaggaaatgtagtttggtttgattggcagatagttgtgaagaatgtcgg

SEQ ID NO: 55295 - DNA, 80 bp, synthetic construct
  source 1..80: mol_type = other DNA
gaaggaaggaaagataaaatggtaaagggctcacacatgtcttaacaaaaatgtccagttcggctcatttggctatactt

SEQ ID NO: 55296 - DNA, 80 bp, synthetic construct
  source 1..80: mol_type = other DNA
tgacagaaattaaaaaaccagttgagcttccacttttcatttcagaagaaatcaggtgctctcctctaaggaccactact

SEQ ID NO: 55297 - DNA, 80 bp, synthetic construct
  source 1..80: mol_type = other DNA
aggaaactctgtgtagaaagtgtcctgttctgatctagtcctgacaggaaacgaagtataatcaacttgttattaactga

SEQ ID NO: 55298 - DNA, 80 bp, synthetic construct; identical to SEQ ID NO: 14510
  source 1..80: mol_type = other DNA

SEQ ID NO: 55299 - DNA, 80 bp, synthetic construct
  source 1..80: mol_type = other DNA
ttgcctcctatggtgtgaacttctaccagtctcacggtccctctggccagtacacccatgaatttgatggagacgaggag

SEQ ID NO: 55300 - DNA, 80 bp, synthetic construct
  source 1..80: mol_type = other DNA
gtacgtgtccaccattccgcctctctttactgaaactaatctttcataccaagttttactcccttcttctcaagagattt

SEQ ID NO: 55301 - DNA, 80 bp, synthetic construct
  source 1..80: mol_type = other DNA
cgttgctcccaagcagaaggtaaataagacctctttgactatcaggtggtgaaatgctggtaggagggctcttccaggat

SEQ ID NO: 55302 - DNA, 80 bp, synthetic construct; identical to SEQ ID NO: 14511
  source 1..80: mol_type = other DNA

SEQ ID NO: 55303 - DNA, 80 bp, synthetic construct
  source 1..80: mol_type = other DNA
cctaagcctggggccttgagtcttgcagagccagccctccaccccatcccatcccacacacatgcacatgagcacactgc

SEQ ID NO: 55304 - DNA, 80 bp, synthetic construct
  source 1..80: mol_type = other DNA
gcttccagacaccaagggctcttatgaatcccatcctgaaaaggaaggtaagattgagatttgttggagctgaaacctca

SEQ ID NO: 55305 - DNA, 80 bp, synthetic construct
  source 1..80: mol_type = other DNA
gaatggacttgctaaatgacctagcactattctctggcctgatttatcatatcccttttctcctccaaatgtttcttctc

SEQ ID NO: 55306 - DNA, 80 bp, synthetic construct; identical to SEQ ID NO: 14512
  source 1..80: mol_type = other DNA

SEQ ID NO: 55307 - DNA, 80 bp, synthetic construct
  source 1..80: mol_type = other DNA
ccttttgttcctacccttggccactgccagccacccctcaattcaggtaccaacgaaccctctgcccttggctcagaatg

SEQ ID NO: 55308 - DNA, 80 bp, synthetic construct
  source 1..80: mol_type = other DNA
taaatttgtgaagaatgacaacagtagaagctttcctctccccttctcaccttgaggagataaaaattctctaggcagga

SEQ ID NO: 55309 - DNA, 80 bp, synthetic construct
  source 1..80: mol_type = other DNA
aatacaaaaattagctgggcatggtgctgggcacctgtaatcccagctactcaggaggctgaagcaggaaaatcgcttga

SEQ ID NO: 55310 - DNA, 80 bp, synthetic construct; identical to SEQ ID NO: 14513
  source 1..80: mol_type = other DNA

SEQ ID NO: 55311 - DNA, 80 bp, synthetic construct
  source 1..80: mol_type = other DNA
atgggtccacagggacctgagagctctaaacagctatgaaatctgccaggatatttctgtccatgctatctgcatcagtg

SEQ ID NO: 55312 - DNA, 80 bp, synthetic construct
  source 1..80: mol_type = other DNA
gaaccttatttttctcatccacaatgtgggagtgataatattttccttgcagagttattgacagaatttgaataatcttg

SEQ ID NO: 55313 - DNA, 80 bp, synthetic construct
  source 1..80: mol_type = other DNA
aagtgagtttcttttcatatgttaactggaggatttttttctttcttgagaggctgagattgggttgctaagagaactct

SEQ ID NO: 55314 - DNA, 80 bp, synthetic construct; identical to SEQ ID NO: 14514
  source 1..80: mol_type = other DNA

SEQ ID NO: 55315 - DNA, 80 bp, synthetic construct
  source 1..80: mol_type = other DNA
atggactttgggtgataatgatgtgtcagtgtaagttcataagttgtagcaaatgtacctctgtcatgaaggatgttact

SEQ ID NO: 55316 - DNA, 80 bp, synthetic construct
  source 1..80: mol_type = other DNA
aaactgtagtataaaaatggtcacatgaaaatgcatgaatgtgctaagaacttttctgcaataggatttaaaataaattt

SEQ ID NO: 55317 - DNA, 80 bp, synthetic construct
  source 1..80: mol_type = other DNA
tataaccagagtcatacagaaatacacaaatgctcccctatttagaatccttccccaagaaatactgaggaaagcaaata

SEQ ID NO: 55318 - DNA, 80 bp, synthetic construct; identical to SEQ ID NO: 14515
  source 1..80: mol_type = other DNA

SEQ ID NO: 55319 - DNA, 80 bp, synthetic construct
  source 1..80: mol_type = other DNA
ctgaggcaggaggattgctgcttgagcccaggagttcgaggctgcagtgagctaggactgactgcaccactgcactcgct

SEQ ID NO: 55320 - DNA, 80 bp, synthetic construct
  source 1..80: mol_type = other DNA
acttcacacacagtctggcccatagtaagcagtttatagaagttaacaaatttgtgttattgttattttctggagtccaa

SEQ ID NO: 55321 - DNA, 80 bp, synthetic construct
  source 1..80: mol_type = other DNA
gaaatatagtaaccaaacgctgagctttgtctagattcatattcaaacaaaacatctgttaaaaaatttatatgaggcaa

SEQ ID NO: 55322 - DNA, 80 bp, synthetic construct; identical to SEQ ID NO: 14516
  source 1..80: mol_type = other DNA

SEQ ID NO: 55323 - DNA, 80 bp, synthetic construct
  source 1..80: mol_type = other DNA
ttatgttagtttttcagtttttctcatttttatcacatttaggaaaccctgtccaaggcctgcccaagactgtaagaacc

SEQ ID NO: 55324 - DNA, 80 bp, synthetic construct
  source 1..80: mol_type = other DNA
ttggctggactaagcccccagacttgtttatatattcactaattcatcaaaaatgcaaaaatggtcattgagtaccagtg

SEQ ID NO: 55325 - DNA, 80 bp, synthetic construct
  source 1..80: mol_type = other DNA
gaatgaggtaaaatgagagagtgttgcacagggaccaggtatggtttggggcagtttagaagtggcttgaagaaatgtat

SEQ ID NO: 55326 - DNA, 80 bp, synthetic construct
  source 1..80: mol_type = other DNA
atcacagatttaatagagaaagttcatgtaacagcaaacaagtttaaagtcattctaattagaattcttgatctgtaaaa

SEQ ID NO: 55327 - DNA, 80 bp, synthetic construct; identical to SEQ ID NO: 14517
  source 1..80: mol_type = other DNA

SEQ ID NO: 55328 - DNA, 80 bp, synthetic construct
  source 1..80: mol_type = other DNA
ttccagtggcggaaaccaaaatgaaacaaactgacaacaaaaaaaatacttctattattaagataatgagaaagtccttg

SEQ ID NO: 55329 - DNA, 80 bp, synthetic construct
  source 1..80: mol_type = other DNA
gagattgttaatcaggatataggaaggtaaggaatccaggaaactgggtctaacccaggatctcactgaaaacggatcct

SEQ ID NO: 55330 - DNA, 80 bp, synthetic construct
  source 1..80: mol_type = other DNA
tggggggaaaaaaaagatgtagatacttcattatggcaactggaagtgtaaaggagaggggaaagggagggtgaaaatgc

SEQ ID NO: 55331 - DNA, 80 bp, synthetic construct; identical to SEQ ID NO: 14518
  source 1..80: mol_type = other DNA

SEQ ID NO: 55332 - DNA, 80 bp, synthetic construct
  source 1..80: mol_type = other DNA
aatcgttcagtctcaaagggaggagtttaggtacagtggaacagcactgacggcagaaacactgttctagttcctgggag

SEQ ID NO: 55333 - DNA, 80 bp, synthetic construct
  source 1..80: mol_type = other DNA
tgcagcactattcacaatggccaagagatggaatcaacctaactatccatcagcagatgaatggataaaaaaaatgtggt

SEQ ID NO: 55334 - DNA, 80 bp, synthetic construct
  source 1..80: mol_type = other DNA
aagtcatggagggggtggggtgtggggagagggagaaaaaggaatgagatgttggtcaaaaggtataagtttcagttaga

SEQ ID NO: 55335 - DNA, 80 bp, synthetic construct; identical to SEQ ID NO: 14519
  source 1..80: mol_type = other DNA

SEQ ID NO: 55336 - DNA, 80 bp, synthetic construct
  source 1..80: mol_type = other DNA
caaatattttcaatccatggttgactgaatcagaggaggcaaaacacacaaatacagggccagctgtattgtatatttga

SEQ ID NO: 55337 - DNA, 80 bp, synthetic construct
  source 1..80: mol_type = other DNA
taatttaaattttttgaaatgtaacattcttaactttttcttgttcaaataaagttttctgttctttattttcaaaaact

SEQ ID NO: 55338 - DNA, 80 bp, synthetic construct
  source 1..80: mol_type = other DNA
tctcagtgatgtcactcaataaagagacttaattccacagtttctccagtgactcaggttatatggagtttccatcgtct

SEQ ID NO: 55339 - DNA, 80 bp, synthetic construct; identical to SEQ ID NO: 14520
  source 1..80: mol_type = other DNA

SEQ ID NO: 55340 - DNA, 80 bp, synthetic construct
  source 1..80: mol_type = other DNA
gggaaaaagactttgatcctctcataaccaggatgtgttcagtgtgacaatgttgaactgaatgttctagaatctgtgtt

SEQ ID NO: 55341 - DNA, 80 bp, synthetic construct
  source 1..80: mol_type = other DNA
tcgggaagagggtgtcatcaggaatgaacaggttacgatgtcaatgacaaagggagctcagacaaggaatgagatggctg

SEQ ID NO: 55342 - DNA, 80 bp, synthetic construct
  source 1..80: mol_type = other DNA
aagtcatttccagcatcagaaggatctggaaaacccagtcctccttcctaataagagggatgagcacgctggctggcagc

SEQ ID NO: 55343 - DNA, 80 bp, synthetic construct; identical to SEQ ID NO: 14521
  source 1..80: mol_type = other DNA

SEQ ID NO: 55344 - DNA, 80 bp, synthetic construct
  source 1..80: mol_type = other DNA
agagacacacggagaggagaggaggatgcacagatgaaactataacagaaagagaagagagatgaagatctcattgaata

SEQ ID NO: 55345 - DNA, 80 bp, synthetic construct
  source 1..80: mol_type = other DNA
aatatatttgaaacatcagtcactatagttgtccccaaacaattccaccatgcttacttagacaacactcgccaaaccag

SEQ ID NO: 55346 - DNA, 80 bp, synthetic construct
  source 1..80: mol_type = other DNA
atgctttcagtgtcttttcaaagtacaaccctctttctagccacggtttggctgggtcacctcaaggtatgttccttcac

SEQ ID NO: 55347 - DNA, 80 bp, synthetic construct
  source 1..80: mol_type = other DNA
ctcttgacaggtctgtggggggagaatggaaacagagatgccccttggggcctgagtagacacagcttgcagtgcacagg

SEQ ID NO: 55348 - DNA, 80 bp, synthetic construct; identical to SEQ ID NO: 14522
  source 1..80: mol_type = other DNA

SEQ ID NO: 55349 - DNA, 80 bp, synthetic construct
  source 1..80: mol_type = other DNA
cttgatgcagatatgtggaggtgggggaacagcagttacccttctgggtaatatgaagagtttgatttttttagtaaatt

SEQ ID NO: 55350 - DNA, 80 bp, synthetic construct
  source 1..80: mol_type = other DNA
taaggcctggttctaggaaacaatctctggagattcgtagaaactggcaaacttttcccctaagtcttaaccctcatagc

SEQ ID NO: 55351 - DNA, 80 bp, synthetic construct
  source 1..80: mol_type = other DNA
tcttgcctcaacctcccaagtagccgggattacagatgcacaccaccacgtccagctaatttttgtatttttagtagaga

SEQ ID NO: 55352 - DNA, 80 bp, synthetic construct; identical to SEQ ID NO: 14523
  source 1..80: mol_type = other DNA

SEQ ID NO: 55353 - DNA, 80 bp, synthetic construct
  source 1..80: mol_type = other DNA
ttcacccagtaaaatcagattccaatgcctcctccaatcttgtcctgtctcctcgcacttcctctcagggtaaggaggaa

SEQ ID NO: 55354 - DNA, 80 bp, synthetic construct
  source 1..80: mol_type = other DNA
tcagcatcttgctctgggcagattcagactgagcccctaaggagcagaactgagtgtgagtgtttgtccccacaccccat

SEQ ID NO: 55355 - DNA, 80 bp, synthetic construct
  source 1..80: mol_type = other DNA
ttaaaccctaaggccccagtcaccagccctaagtcagtctctcatagctgtcagagctggttctggggctttagtagtgt

SEQ ID NO: 55356 - DNA, 80 bp, synthetic construct; identical to SEQ ID NO: 14524
  source 1..80: mol_type = other DNA

SEQ ID NO: 55357 - DNA, 80 bp, synthetic construct
  source 1..80: mol_type = other DNA
tctcaggtatttctttatagtggagtgagaagagccaattaaacctcttttctttataaattactcagtctcagagattt

SEQ ID NO: 55358 - DNA, 80 bp, synthetic construct
  source 1..80: mol_type = other DNA
gagatgggatgggaaggatcagcgggagctctgccctttgtcttgtggggcccacagtaaaaggaaaccagtttcccctt

SEQ ID NO: 55359 - DNA, 80 bp, synthetic construct
  source 1..80: mol_type = other DNA
tggtcattccgaaaccaccggactttgatctgggctggatagaaatctgtcaccgagcagaccagcaggttgtggtggtt

SEQ ID NO: 55360 - DNA, 80 bp, synthetic construct
  source 1..80: mol_type = other DNA
ccctccttggaaccagaatagaaagatacctggagtccaagtcttggattaaggttccttcaacaaatataaatttgaca

SEQ ID NO: 55361 - DNA, 80 bp, synthetic construct; identical to SEQ ID NO: 14525
  source 1..80: mol_type = other DNA

SEQ ID NO: 55362 - DNA, 80 bp, synthetic construct
  source 1..80: mol_type = other DNA
ttttcctgctttttcttaatttccttttaaccctcaagatagtgtaattactagctgcctaccctactccatccccttgc

SEQ ID NO: 55363 - DNA, 80 bp, synthetic construct
  source 1..80: mol_type = other DNA
aattaaatggcactcatgagccattgtctggaaggaatcttggtttctgcttggacttgaacttttctttaggccctcct

SEQ ID NO: 55364 - DNA, 80 bp, synthetic construct
  source 1..80: mol_type = other DNA
attgacagcattaggatgtgggtcagaagaaggcaaggaagttttgtgaacctgcatagataacactggggtcagactag

SEQ ID NO: 55365 - DNA, 80 bp, synthetic construct; identical to SEQ ID NO: 14526
  source 1..80: mol_type = other DNA

SEQ ID NO: 55366 - DNA, 80 bp, synthetic construct
  source 1..80: mol_type = other DNA
agtgggtaaaattgacgttcagaatgtttatgcctgaagtggatagtgatggggggagggagaaaatctactccaaaagc

SEQ ID NO: 55367 - DNA, 80 bp, synthetic construct
  source 1..80: mol_type = other DNA
ccattcaagcgttgtttttattttcagcaaacacctttttccccagactgcattcacaaaccttactaagatccaagtca

SEQ ID NO: 55368 - DNA, 80 bp, synthetic construct
  source 1..80: mol_type = other DNA
tcattaatttaacagaagatcattgagctcataccacatgccggtccacgagtcaggtactaggcatgcaatgattaaaa

SEQ ID NO: 55369 - DNA, 80 bp, synthetic construct
  source 1..80: mol_type = other DNA
aaagttaaaatatcttatttcacaactgtaattgctggatgccctgcgcgcagttgtggagcagccctaactccaccagg

SEQ ID NO: 55370 - DNA, 80 bp, synthetic construct; identical to SEQ ID NO: 14527
  source 1..80: mol_type = other DNA

SEQ ID NO: 55371 - DNA, 80 bp, synthetic construct
  source 1..80: mol_type = other DNA
agactcgggccccggccaagggtgagccccgcggaaggacgacgacgctcaccttgccgctgcaaggtcgtgcgcagctc

SEQ ID NO: 55372 - DNA, 80 bp, synthetic construct
  source 1..80: mol_type = other DNA
atgtatctggccacaccgcgcacgcgctctgtcccgttggtgaagtagcacatgcccttaaactggaccaagaaatcctc

SEQ ID NO: 55373 - DNA, 80 bp, synthetic construct
  source 1..80: mol_type = other DNA
cctgggatcctcgaggcatctctgccccagccctgcccgccctctctgagggcctcgggaatctgccttcctttagggag

SEQ ID NO: 55374 - DNA, 80 bp, synthetic construct; identical to SEQ ID NO: 14528
  source 1..80: mol_type = other DNA

SEQ ID NO: 55375 - DNA, 80 bp, synthetic construct
  source 1..80: mol_type = other DNA
cctagaaggaaacatttattcatggaaagagcccaagcttttgaattctatagggtccaattaaactgagtcaatcacca

SEQ ID NO: 55376 - DNA, 80 bp, synthetic construct
  source 1..80: mol_type = other DNA
cccttctttacttcctccttcctatcatactaaattcagtccaccatcaactcaggtccctgaatcccactcaagtcacc

SEQ ID NO: 55377 - DNA, 80 bp, synthetic construct
  source 1..80: mol_type = other DNA
ccttacattttcccagtgcagaaaaatcctactgtgtctttggggaaatgcatatctttggggaaatgcataaccgtgga

SEQ ID NO: 55378 - DNA, 80 bp, synthetic construct; identical to SEQ ID NO: 14529
  source 1..80: mol_type = other DNA

SEQ ID NO: 55379 - DNA, 80 bp, synthetic construct
  source 1..80: mol_type = other DNA
agaccaaggaaaaagcagtggtagtcaacacagctcaaacctaatggatcttatgtacctgccggaaagaataaaaacct

SEQ ID NO: 55380 - DNA, 80 bp, synthetic construct
  source 1..80: mol_type = other DNA
atgcctggcactgtttcttcttcaaattgcactagatgaacatttgaggtgaagatttctgaatagctgaagattgaatg

SEQ ID NO: 55381 - DNA, 80 bp, synthetic construct
  source 1..80: mol_type = other DNA
tctgaagagccttaagttttggtgagaagagcaaagttcttagaaggaaatgatggtgagttgcagttctaccactaatg

SEQ ID NO: 55382 - DNA, 80 bp, synthetic construct; identical to SEQ ID NO: 14530
  source 1..80: mol_type = other DNA

SEQ ID NO: 55383 - DNA, 80 bp, synthetic construct
  source 1..80: mol_type = other DNA
tcacatttagttttgaagatagagagcaaaagctgtgaagaagaatttcctgggggctgaatcgtattaatgatggagca

SEQ ID NO: 55384 - DNA, 80 bp, synthetic construct
  source 1..80: mol_type = other DNA
ctgacaaacattactggtaatcctaaccaagacaataaatatctccacctctcttcttgtctcccttcctcccactcttc

SEQ ID NO: 55385 - DNA, 80 bp, synthetic construct
  source 1..80: mol_type = other DNA
cggtagcaagaggtttgcaatagtggcacatgaaagcattgagccactctaatattctgtattattctgtgcatagattt

SEQ ID NO: 55386 - DNA, 80 bp, synthetic construct
  source 1..80: mol_type = other DNA
acatcaaactcagacctagaacggaactgggggcaagaaagaataggcagagagggacctgaagatgccctcaatgtcct

SEQ ID NO: 55387 - DNA, 80 bp, synthetic construct; identical to SEQ ID NO: 14531
  source 1..80: mol_type = other DNA

SEQ ID NO: 55388 - DNA, 80 bp, synthetic construct
  source 1..80: mol_type = other DNA
ctatgttgcccaggttggtttcaatgtcctggcctcaagcaatcctcccacctcggcctcccaaagcactgggattatag

SEQ ID NO: 55389 - DNA, 80 bp, synthetic construct
  source 1..80: mol_type = other DNA
ttgaggtcaggaatttgagaccagcctggccaacatggtgaaacccgtctctaccaaaaataaaaaaaattagccaagtg

SEQ ID NO: 55390 - DNA, 80 bp, synthetic construct
  source 1..80: mol_type = other DNA
aaacaaaaaaaaaacacctaatctaaaaggctttggtttggggcttctgccagttgtgtccccctgatccagccttctct

SEQ ID NO: 55391 - DNA, 80 bp, synthetic construct; identical to SEQ ID NO: 14532
  source 1..80: mol_type = other DNA

SEQ ID NO: 55392 - DNA, 80 bp, synthetic construct
  source 1..80: mol_type = other DNA
aatgtaaacacaggagtcatcctgtcaccagaagggttatccaggactctgtcctgcaattacttccagaatcaagaaac

SEQ ID NO: 55393 - DNA, 80 bp, synthetic construct
  source 1..80: mol_type = other DNA
caacttttaggtaaccggttacatgaatttttcatgacacatataaggtaggccttttctctttaaacagttatctcttt

SEQ ID NO: 55394 - DNA, 80 bp, synthetic construct
  source 1..80: mol_type = other DNA
aagctttagcaggaagatagaaaatcagatgatacaaggcatttgggacacttgggggaaatggggaaggtgagtgatct

SEQ ID NO: 55395 - DNA, 80 bp, synthetic construct
  source 1..80: mol_type = other DNA
acggagctttgtttcctgatctgtttctacaggtttcttcttccagtcaatctcatccatgcatcacctcagctggacca

SEQ ID NO: 55396 - DNA, 80 bp, synthetic construct; identical to SEQ ID NO: 14533
  source 1..80: mol_type = other DNA

SEQ ID NO: 55397 - DNA, 80 bp, synthetic construct
  source 1..80: mol_type = other DNA
ttggggagactactcatatcctcaaataggaaaacttaagatattcaatttaaacctcaatgacatatcaatccatgctt

SEQ ID NO: 55398 - DNA, 80 bp, synthetic construct
  source 1..80: mol_type = other DNA
tgatgtagcaatcccacttccaggatacagacaaaggattttaaatcagtaggttgaaaatatatccacactcccatgtt

SEQ ID NO: 55399 - DNA, 80 bp, synthetic construct
  source 1..80: mol_type = other DNA
aatcaattagaggtttattttgccaaggttcaggatgcacctgggaaaaacacgaatcacaggagcatctgtgatcaatg

SEQ ID NO: 55400 - DNA, 80 bp, synthetic construct; identical to SEQ ID NO: 14534
  source 1..80: mol_type = other DNA

SEQ ID NO: 55401 - DNA, 80 bp, synthetic construct
  source 1..80: mol_type = other DNA
ttccatagagtaatgccaaggattaaatgaagtggcaaatatatagcatctaaaatagttttgaacacatagtagatgct

SEQ ID NO: 55402 - DNA, 80 bp, synthetic construct
  source 1..80: mol_type = other DNA
tatccttcaccctccttcccatcctccccaatttcttactctccattgtcctttataccattctgtatgcctttgagtac

SEQ ID NO: 55403 - DNA, 80 bp, synthetic construct
  source 1..80: mol_type = other DNA
tgcctaatcaaatatcatgaagattttccctattttttttctaagagttttatggttttagttttcacatttaggtcttt

SEQ ID NO: 55404 - DNA, 80 bp, synthetic construct; identical to SEQ ID NO: 14535
  source 1..80: mol_type = other DNA

SEQ ID NO: 55405 - DNA, 80 bp, synthetic construct
  source 1..80: mol_type = other DNA
agaaaagaagagcaggggaaaaacaaaacagagcatccaagagctgcagtgctgtattgaatggttacatcacctttgtt

SEQ ID NO: 55406 - DNA, 80 bp, synthetic construct
  source 1..80: mol_type = other DNA
caccatgcttgcccacttaatttttctctctttgtagacaaggtctccttatgttgcccaggctgctctttaggttcaag

SEQ ID NO: 55407 - DNA, 80 bp, synthetic construct
  source 1..80: mol_type = other DNA
tttattgatctatttcaaactcactgattcttcccagggctgtaccacatttgctgatgagcttgtcaaatgcattcttt

SEQ ID NO: 55408 - DNA, 80 bp, synthetic construct
  source 1..80: mol_type = other DNA
ttaatcacagtttatgaagcaggtttactaattaccaataccaagggaggaaagggaggacttccactgcatggagaata

SEQ ID NO: 55409 - DNA, 80 bp, synthetic construct; identical to SEQ ID NO: 14536
  source 1..80: mol_type = other DNA

SEQ ID NO: 55410 - DNA, 80 bp, synthetic construct
  source 1..80: mol_type = other DNA
aacttctccaacagtaactttgcatgaactcatgtgttctgtcaatcgagaaaaatggcaagtctcaatcattttaggag

SEQ ID NO: 55411 - DNA, 80 bp, synthetic construct
  source 1..80: mol_type = other DNA
ctttgtctggctcagttaatctgcattttttttacataagatgacatagacaaaacgggggaaggggaacaattagatat

SEQ ID NO: 55412 - DNA, 80 bp, synthetic construct
  source 1..80: mol_type = other DNA
tctctactaaaagtacaaaaaaaaaaaattagccaggcatggtggcagatgcctgtaatctcagctacttgggaggctga

SEQ ID NO: 55413 - DNA, 80 bp, synthetic construct; identical to SEQ ID NO: 14537
  source 1..80: mol_type = other DNA

SEQ ID NO: 55414 - DNA, 80 bp, synthetic construct
  source 1..80: mol_type = other DNA
aatttcctttcatagttctaaaactatgaccaagtgttcatttcttcctgataggcacttagcacactgaccatgtgcct

SEQ ID NO: 55415 - DNA, 80 bp, synthetic construct
  source 1..80: mol_type = other DNA
aactaggttgttcttctggtttagtgacagagactactatcccagatgaaaatacaatagtcttttagtgcttctatgca

SEQ ID NO: 55416 - DNA, 80 bp, synthetic construct
  source 1..80: mol_type = other DNA
ttcagaggatgaggggaatcaagaatggcttgtgaaggagggaaacaaatattagttacagtcataatgacaactataat

SEQ ID NO: 55417 - DNA, 80 bp, synthetic construct; identical to SEQ ID NO: 14538
  source 1..80: mol_type = other DNA

SEQ ID NO: 55418 - DNA, 80 bp, synthetic construct
  source 1..80: mol_type = other DNA
ctcattctttgttttaggattagcagagatgtaagacagaatttcatgaaaatattcaacctggtggatgatgccaaatt

SEQ ID NO: 55419 - DNA, 80 bp, synthetic construct
  source 1..80: mol_type = other DNA
catgttgaaagttatatttaaatatgggcactctgcttcatactcttttgccaatattacttcaaaactgtacaaaccta

SEQ ID NO: 55420 - DNA, 80 bp, synthetic construct
  source 1..80: mol_type = other DNA
agcagcccagacactcaagacaagaggaataataactaagtgaccacaaaggaaattttttatcacatgcctggctgttc

SEQ ID NO: 55421 - DNA, 80 bp, synthetic construct
  source 1..80: mol_type = other DNA
accattaaatactttcttctccaactaatgagaagatgtggggcctcattaattctctctggcagattaggtcaatgaat

SEQ ID NO: 55422 - DNA, 80 bp, synthetic construct; identical to SEQ ID NO: 14539
  source 1..80: mol_type = other DNA

SEQ ID NO: 55423 - DNA, 80 bp, synthetic construct
  source 1..80: mol_type = other DNA
agctaaacaattaaaacatgttcatagtgccccaaaaaaaggacaactgtggaatgatattggctgcacataaacagaac

SEQ ID NO: 55424 - DNA, 80 bp, synthetic construct
  source 1..80: mol_type = other DNA
ttaatttacaaattgtgcagtcataggttaacaacaataactaataataaaatagaacaattataacaatatactgtaat

SEQ ID NO: 55425 - DNA, 80 bp, synthetic construct
  source 1..80: mol_type = other DNA
gaccactgtattacatttctaggaagtcgcaaaccctttgagaaaattttgggatgggagacaaacatatttctaagaag

SEQ ID NO: 55426 - DNA, 80 bp, synthetic construct; identical to SEQ ID NO: 14540
  source 1..80: mol_type = other DNA

SEQ ID NO: 55427 - DNA, 80 bp, synthetic construct
  source 1..80: mol_type = other DNA
aatttgctctggcctctctaaagaacatcaaactgggactgctttcaaggatagaacaagttatcctgcatttatgttgg

SEQ ID NO: 55428 - DNA, 80 bp, synthetic construct
  source 1..80: mol_type = other DNA
tacacacatacagagattatactgaggcagattaaaagtttaaatgagaaggaactcagaactgaggaggaaccacccag

SEQ ID NO: 55429 - DNA, 80 bp, synthetic construct
  source 1..80: mol_type = other DNA
acattcaacactgtctcacccgcacaagcaacctgccctgaattgtctcttggggtgtactgttgattctgcacctaact

SEQ ID NO: 55430 - DNA, 80 bp, synthetic construct
  source 1..80: mol_type = other DNA
taaaaagtggtgagatgagtttaaataacaaaacaaagaaagaaaccgtacaggaaagtattcttagactatactaagaa

SEQ ID NO: 55431 - DNA, 80 bp, synthetic construct; identical to SEQ ID NO: 14541
  source 1..80: mol_type = other DNA

SEQ ID NO: 55432 - DNA, 80 bp, synthetic construct
  source 1..80: mol_type = other DNA
ctcagttccttgccacatggccctctacatcttcaaagtcagtaatacagagtctttctcatgtttaatctccctcttca

SEQ ID NO: 55433 - DNA, 80 bp, synthetic construct
  source 1..80: mol_type = other DNA
tctggccataaactggccccaaatttatggcccagtttatggccataaactggccataaataaaatctctgcagcactgt

SEQ ID NO: 55434 - DNA, 80 bp, synthetic construct
  source 1..80: mol_type = other DNA
gctgcaattaattcagcccatcccttcgtttcccataggaatacttttagttaatttaatatctatagaaacaatgctaa

SEQ ID NO: 55435 - DNA, 80 bp, synthetic construct; identical to SEQ ID NO: 14542
  source 1..80: mol_type = other DNA

SEQ ID NO: 55436 - DNA, 80 bp, synthetic construct
  source 1..80: mol_type = other DNA
aatcttgttagctcaaagtccaaattcgcagtgccttcataccaaattacaggacttgaagatgtgagaattaggaactt

SEQ ID NO: 55437 - DNA, 80 bp, synthetic construct
  source 1..80: mol_type = other DNA
aggtggtatttttttcacccacacctagctttgctggcattgagaagacacacctaagagaataattaatcatacctaca

SEQ ID NO: 55438 - DNA, 80 bp, synthetic construct
  source 1..80: mol_type = other DNA
cagagtcttactccattgcccaggctggagtgcagtggcacaatcttggctcactctgcaacttccatctcctgggttga

SEQ ID NO: 55439 - DNA, 80 bp, synthetic construct; identical to SEQ ID NO: 14543
  source 1..80: mol_type = other DNA

SEQ ID NO: 55440 - DNA, 80 bp, synthetic construct
  source 1..80: mol_type = other DNA
gtggtgcaaggcatcacatagcaagcaggctgagagggctacctcaagtatctctttctcctcttatcaaacccttagtg

SEQ ID NO: 55441 - DNA, 80 bp, synthetic construct
  source 1..80: mol_type = other DNA
ttcacccctgcagcctcaaaactcatattcttctcacattcaaatacattcattttatctccagagccccaaagtcttaa

SEQ ID NO: 55442 - DNA, 80 bp, synthetic construct
  source 1..80: mol_type = other DNA
gggaaagacattaaattttaaagctggaaataatgtcttttgactccatgttcctcatcctgagcacacaggggcagaag

SEQ ID NO: 55443 - DNA, 80 bp, synthetic construct; identical to SEQ ID NO: 14544
  source 1..80: mol_type = other DNA

SEQ ID NO: 55444 - DNA, 80 bp, synthetic construct
  source 1..80: mol_type = other DNA
aaataaggggacccaggggaccagcgttcagcatatggaggatcccgccggcttctgagttcccttcatatttattgatc

SEQ ID NO: 55445 - DNA, 80 bp, synthetic construct
  source 1..80: mol_type = other DNA
gctttacaaagcagtattgctgcctgcatgtctcacctccagtcttaaggcggtttttccctatctcagtagatggaacg

SEQ ID NO: 55446 - DNA, 80 bp, synthetic construct
  source 1..80: mol_type = other DNA
tcccttcccacgaggccatatttcagactatcccatggggagaaaccttggacaatacctggctttcctaggcagaggtc

SEQ ID NO: 55447 - DNA, 80 bp, synthetic construct
  source 1..80: mol_type = other DNA
agagcacggtgttgggggtaaggtcatagattaacagcatctcaaggcagaagaatttttcttagtgcagaacaaaatgg

SEQ ID NO: 55448 - DNA, 80 bp, synthetic construct; identical to SEQ ID NO: 14545
  source 1..80: mol_type = other DNA

SEQ ID NO: 55449 - DNA, 80 bp, synthetic construct
  source 1..80: mol_type = other DNA
cctgtgatggcaggggtagacttgaagatctctaaagtgcattcagtgtttgtctcccattgtcttgatgaatagcttct

SEQ ID NO: 55450 - DNA, 80 bp, synthetic construct
  source 1..80: mol_type = other DNA
ccacctttaagttattttttacctctcacagctttaatgtaagcagttaaaagtagccatgcagctgcctgactgctttg

SEQ ID NO: 55451 - DNA, 80 bp, synthetic construct
  source 1..80: mol_type = other DNA
gtccatatttctattgacattctggtcctgaccactcaaatcatcacaaaggagttccagacttttcctagtcttcttga

SEQ ID NO: 55452 - DNA, 80 bp, synthetic construct; identical to SEQ ID NO: 14546
  source 1..80: mol_type = other DNA

SEQ ID NO: 55453 - DNA, 80 bp, synthetic construct
  source 1..80: mol_type = other DNA
agcatcatgtgacaagagggcaaaggggtatggctcaaggtctctgtttctcctctcaatgccccaccctcaagacctca

SEQ ID NO: 55454 - DNA, 80 bp, synthetic construct
  source 1..80: mol_type = other DNA
ttcaaaccatagcattgcccatctcttttactctcctccctcctcttcttttctgtactccactgtccctgtccagaggt

SEQ ID NO: 55455 - DNA, 80 bp, synthetic construct
  source 1..80: mol_type = other DNA
tctgtgtcttctcacttccttatatctatagcatacaagtgtttgaaaacattctcctcaacctcctttaaaatcatggg

SEQ ID NO: 55456 - DNA, 80 bp, synthetic construct
  source 1..80: mol_type = other DNA
ttcaggcatagaagtcaagacttcagccctactcaccatatgcatatctatcttatttgaagttctcaggaagaactttt

SEQ ID NO: 55457 - DNA, 80 bp, synthetic construct; identical to SEQ ID NO: 14547
  source 1..80: mol_type = other DNA

SEQ ID NO: 55458 - DNA, 80 bp, synthetic construct
  source 1..80: mol_type = other DNA
tgtcatgatcctaatgcttgttttattcctcaatgtcatcattgattcaaccatagcttttatttttaatttgctttttg

SEQ ID NO: 55459 - DNA, 80 bp, synthetic construct
  source 1..80: mol_type = other DNA
ggcgggcaccaccatgcccggctaattttttgtatttttagtagagacggggtttcactgtgtcagccaggatagtctcg

SEQ ID NO: 55460 - DNA, 80 bp, synthetic construct
  source 1..80: mol_type = other DNA
ttgtacagattattttgtcaaacagttattaagcctagtacttattagttatttttcctgatcctctccctcttcccact

SEQ ID NO: 55461 - DNA, 80 bp, synthetic construct
  source 1..80: mol_type = other DNA
tgcaaaggacatgattttgtttctttatggctgcatagtattccatggtgtatatgtaccacattttatttatctagtct

SEQ ID NO: 55462 - DNA, 80 bp, synthetic construct; identical to SEQ ID NO: 14548
  source 1..80: mol_type = other DNA

SEQ ID NO: 55463 - DNA, 80 bp, synthetic construct
  source 1..80: mol_type = other DNA
acttttatccccaagacacacaattatcagcttccccaaggtcaaaatgaaagaaaaaatgttaaaaaataaaaaataaa

SEQ ID NO: 55464 - DNA, 80 bp, synthetic construct
  source 1..80: mol_type = other DNA
gaagcctcatattgaaggagaaataagatccttttcagacaggcaaatgctgagcaaattcattaccaccaaacctacct

SEQ ID NO: 55465 - DNA, 80 bp, synthetic construct
  source 1..80: mol_type = other DNA
acacatatcaatactaaccttaaatgtaaatgagctaaataccccaattaaaagacacagagtgacaagctggataaaga

SEQ ID NO: 55466 - DNA, 80 bp, synthetic construct; identical to SEQ ID NO: 14549
  source 1..80: mol_type = other DNA

SEQ ID NO: 55467 - DNA, 80 bp, synthetic construct
  source 1..80: mol_type = other DNA
ttcatttcggtcttttccatgatttcaatgacttttttcctgttagcccatttctataacccattctagcatgtgtatca

SEQ ID NO: 55468 - DNA, 80 bp, synthetic construct
  source 1..80: mol_type = other DNA
tatggcctgtctctggacttaacatcccatgtcctcactcagactacataactttagacccaccctattactatggactc

SEQ ID NO: 55469 - DNA, 80 bp, synthetic construct
  source 1..80: mol_type = other DNA
aactataccccctggataatcttacctgtacacagtttgaatagatgtcctttacagctagaataatgatactagttaaa

SEQ ID NO: 55470 - DNA, 80 bp, synthetic construct; identical to SEQ ID NO: 14550
  source 1..80: mol_type = other DNA

SEQ ID NO: 55471 - DNA, 80 bp, synthetic construct
  source 1..80: mol_type = other DNA
ttattcccttactcagctttcctcttttgtagcttcatagcaagaatcacaacctaacactgcattttatgtctgtttat

SEQ ID NO: 55472 - DNA, 80 bp, synthetic construct
  source 1..80: mol_type = other DNA
acataaaggctatctttatttaaataaacccgttatttccatgagtcacttgctcctcctgctacatgtagagaactatc

SEQ ID NO: 55473 - DNA, 80 bp, synthetic construct
  source 1..80: mol_type = other DNA
tcaacagaagtgcctttggacattcacacttgatcttccaaaaccacatcagcttctagaacaatgcttctagacagttt

SEQ ID NO: 55474 - DNA, 80 bp, synthetic construct
  source 1..80: mol_type = other DNA
gctgttttccatttgagtttcttctgtgaattactgttcatctactttccaatatttcaactaggttatttaatccattg

SEQ ID NO: 55475 - DNA, 80 bp, synthetic construct; identical to SEQ ID NO: 14551
  source 1..80: mol_type = other DNA

SEQ ID NO: 55476 - DNA, 80 bp, synthetic construct
  source 1..80: mol_type = other DNA
ataccccacatacacaaagatacacatattaccattaaaagtcattgacctggggataatgctagtggaggaaaggaatg

SEQ ID NO: 55477 - DNA, 80 bp, synthetic construct
  source 1..80: mol_type = other DNA
tatcaagaatgctgcagatggtggcaggatgctcaatgtgaaaaaggatagtggcttgcattagaatgacagcagcgaag

SEQ ID NO: 55478 - DNA, 80 bp, synthetic construct
  source 1..80: mol_type = other DNA
tattttgaacacatggaaggaagagtaagggaaaaaagagtggctgggttaccaccctcaagaaatgctgatccctcaaa

SEQ ID NO: 55479 - DNA, 80 bp, synthetic construct; identical to SEQ ID NO: 14552
  source 1..80: mol_type = other DNA

SEQ ID NO: 55480 - DNA, 80 bp, synthetic construct
  source 1..80: mol_type = other DNA
tttcctgcccacaccctgcttccccatgcgttaagttagcagccttttttccctcttgttgttttctgccttctgatatt

SEQ ID NO: 55481 - DNA, 80 bp, synthetic construct
  source 1..80: mol_type = other DNA
cattggtcatctacttggtgtccagcactaggttattcctaagtatcactgaactttgtgataacgctgaagatatgttt

SEQ ID NO: 55482 - DNA, 80 bp, synthetic construct
  source 1..80: mol_type = other DNA
ataattgtctaagaattgttcattttttccttgtcttggcactatgagacactgggatataatataaaaggtaacagatt

SEQ ID NO: 55483 - DNA, 80 bp, synthetic construct; identical to SEQ ID NO: 14553
  source 1..80: mol_type = other DNA

SEQ ID NO: 55484 - DNA, 80 bp, synthetic construct
  source 1..80: mol_type = other DNA
taaccccagttactacagtaacaaccgggaggtgaaacagattaatcagaggtaaataggttaaaataaagcttatcgga

SEQ ID NO: 55485 - DNA, 80 bp, synthetic construct
  source 1..80: mol_type = other DNA
acctcttcaaggaaaactgcaaatcactcttcaaagaaatcagagatgacacaaacaaagtgaaaaacattccatactca

SEQ ID NO: 55486 - DNA, 80 bp, synthetic construct
  source 1..80: mol_type = other DNA
ggcaatcctaagcaaaaagaacaaagctgaaggcatcacattacccaacttcaaactatactacagggctacagtaacta

SEQ ID NO: 55487 - DNA, 80 bp, synthetic construct
  source 1..80: mol_type = other DNA
gaactggctagccatatgcagaagattgaaactggacctcttccttacaccatatacaaaaatcaactcaagttggatta

SEQ ID NO: 55488 - DNA, 80 bp, synthetic construct; identical to SEQ ID NO: 14554
  source 1..80: mol_type = other DNA

SEQ ID NO: 55489 - DNA, 80 bp, synthetic construct
  source 1..80: mol_type = other DNA
aaatgcaaaccaaaaccgtaatgagataccatctcacaccagtaagaatggttatcattaaaaagtgaaaaaacaacaga

SEQ ID NO: 55490 - DNA, 80 bp, synthetic construct
  source 1..80: mol_type = other DNA
acatatgcatgcatatgttcattgcagcactattcacaatagcaaagacatggaatcaacccaaatgcccatcaatggta

SEQ ID NO: 55491 - DNA, 80 bp, synthetic construct
  source 1..80: mol_type = other DNA
tatgagtttatagttctcattataggtgggagatgaatgatgagaactcttggacacatggaggggaacaacacacactg

SEQ ID NO: 55492 - DNA, 80 bp, synthetic construct; identical to SEQ ID NO: 14555
  source 1..80: mol_type = other DNA

SEQ ID NO: 55493 - DNA, 80 bp, synthetic construct
  source 1..80: mol_type = other DNA
taaggaaaacatctttcagtttgagtaccttgcccaagatcacagctcataatttgttttaatgatataccttagataat

SEQ ID NO: 55494 - DNA, 80 bp, synthetic construct
  source 1..80: mol_type = other DNA
attcattacaaggaaccagtctaaggactgttgattgaatcaaaagagtgatggtgacattctctttctaattgtcttga

SEQ ID NO: 55495 - DNA, 80 bp, synthetic construct
  source 1..80: mol_type = other DNA
tattactgagtaatctttttaatttttattgcgcaaacagaatctcaggtaagtctttgaattaattaatgctggtgatt

SEQ ID NO: 55496 - DNA, 80 bp, synthetic construct; identical to SEQ ID NO: 14556
  source 1..80: mol_type = other DNA

SEQ ID NO: 55497 - DNA, 80 bp, synthetic construct
  source 1..80: mol_type = other DNA
caaatattttaccagccattatgcatcagtcactctctaggtgccaggaatgttgcatggaaggaaaatgggcatggact

SEQ ID NO: 55498 - DNA, 80 bp, synthetic construct
  source 1..80: mol_type = other DNA
acagaacgggttggttggacaattataggagacaagattggacaagtacacatgtaagacatggtaaggagatttgattt

SEQ ID NO: 55499 - DNA, 80 bp, synthetic construct
  source 1..80: mol_type = other DNA
gcagaacctaaggagaagcaaatagaaaaagagaaattaggaaataagaaagttagcagttttctttgatagcaagtgga

SEQ ID NO: 55500 - DNA, 80 bp, synthetic construct; identical to SEQ ID NO: 14557
  source 1..80: mol_type = other DNA

SEQ ID NO: 55501 - DNA, 80 bp, synthetic construct
  source 1..80: mol_type = other DNA
gtcaacagtgatctgatgatgaacggtgtcccctcagaatataaaggtgttctttgaacgttcacaggagcgatacctaa

SEQ ID NO: 55502 - DNA, 80 bp, synthetic construct
  source 1..80: mol_type = other DNA
gaagaaacttcaattacatgatggctttatgctacctagacctctttcttcagtctttggcatgttctaatctcggaggc

SEQ ID NO: 55503 - DNA, 80 bp, synthetic construct
  source 1..80: mol_type = other DNA
agaaatgcctaagagaagggtgaccctggaaatgtcttgactctgggaagatcttctaaccactccacatggtaataagc

SEQ ID NO: 55504 - DNA, 80 bp, synthetic construct; identical to SEQ ID NO: 14558
  source 1..80: mol_type = other DNA

SEQ ID NO: 55505 - DNA, 80 bp, synthetic construct
  source 1..80: mol_type = other DNA
cacattattttctttattaactgttactatgcccatggcattcatcactctgacactttcataatggattatgaggcttg

SEQ ID NO: 55506 - DNA, 80 bp, synthetic construct
  source 1..80: mol_type = other DNA
ccttccaaagtgctcagatcatgggcatgcacccagccacatttttaacctatataaatagagatggggagaaaaaacaa

SEQ ID NO: 55507 - DNA, 80 bp, synthetic construct
  source 1..80: mol_type = other DNA
cagattgagggatcagtcatgcaaaactgcccccttcccacttcagatgccagttgctatcacctgtacttctgaccatc

SEQ ID NO: 55508 - DNA, 80 bp, synthetic construct
  source 1..80: mol_type = other DNA
gatacagacgaacagattgataaagaaaaacaaaacacataggacaaagtatgggggaaagagtgcggagcttccacacc

SEQ ID NO: 55509 - DNA, 80 bp, synthetic construct; identical to SEQ ID NO: 14559
  source 1..80: mol_type = other DNA

SEQ ID NO: 55510 - DNA, 80 bp, synthetic construct
  source 1..80: mol_type = other DNA
accagggtcagaaaccaaatatatacttcctattatatcacaatatcacacacactagcttgggtcaatcagttgcatta

SEQ ID NO: 55511 - DNA, 80 bp, synthetic construct
  source 1..80: mol_type = other DNA
atatagaccctatatgcctgttatgaataatagatgagctttgcaatgaagagctatgcatgttactttttattagaatg

SEQ ID NO: 55512 - DNA, 80 bp, synthetic construct
  source 1..80: mol_type = other DNA
tcaccatctccctatacaagagatccccgacctagcaagctcatctacaaacaaatattcttattcttggaacagagttg

SEQ ID NO: 55513 - DNA, 80 bp, synthetic construct; identical to SEQ ID NO: 14560
  source 1..80: mol_type = other DNA

SEQ ID NO: 55514 - DNA, 80 bp, synthetic construct
  source 1..80: mol_type = other DNA
tgtggtttccattactataaaagagagcactgaagtccaaagaaagtactgtgtatttcccttttggggccctgatgttc

SEQ ID NO: 55515 - DNA, 80 bp, synthetic construct
  source 1..80: mol_type = other DNA
ctacagaatatgtggcacccgtattttgtcagagaagacaaatgcgttgttcctcagattggtaggattcatgggcattt

SEQ ID NO: 55516 - DNA, 80 bp, synthetic construct
  source 1..80: mol_type = other DNA
aagtcaaaatacagaaatgcattcaaaaaaaagtttaggatgtagaggaggatgggatcaccatgagacagccgtccaat

SEQ ID NO: 55517 - DNA, 80 bp, synthetic construct; identical to SEQ ID NO: 14561
  source 1..80: mol_type = other DNA

SEQ ID NO: 55518 - DNA, 80 bp, synthetic construct
  source 1..80: mol_type = other DNA
agcccagagtaagaggattacctgttgggatgcacaaaggaatttaaaccccattgaaatttgtgacccaaatcattgtt

SEQ ID NO: 55519 - DNA, 80 bp, synthetic construct
  source 1..80: mol_type = other DNA
tacattccccagcgtgctcagaatatgcatagagagtttaaatcaaggcgtaagagtttccaacccttctatctgtatgg

SEQ ID NO: 55520 - DNA, 80 bp, synthetic construct
  source 1..80: mol_type = other DNA
gaaagaaatcacacaaattgcaaggtcgcaatttttttcaacccatcacagagctgggattgagcttccaactagcttga

SEQ ID NO: 55521 - DNA, 80 bp, synthetic construct; identical to SEQ ID NO: 14562
  source 1..80: mol_type = other DNA

SEQ ID NO: 55522 - DNA, 80 bp, synthetic construct
  source 1..80: mol_type = other DNA
ttgtttgtttgtttgtttgtttgttttgagatggagtcttgctttgtcgcccaggctgcagtgcagtggtgcgatctcct

SEQ ID NO: 55523 - DNA, 80 bp, synthetic construct
  source 1..80: mol_type = other DNA
ccaaagtgctggaatacacgtgtgggccactgcgcccagcctcctccgttaatctattatcattcttctctaatattctc

SEQ ID NO: 55524 - DNA, 80 bp, synthetic construct
  source 1..80: mol_type = other DNA
atagcagacaggcatggtggccgacacctgtaaccccagcactttaggaggccgaggcaggaagatcacttgagcccaga

SEQ ID NO: 55525 - DNA, 80 bp, synthetic construct; identical to SEQ ID NO: 14563
  source 1..80: mol_type = other DNA

SEQ ID NO: 55526 - DNA, 80 bp, synthetic construct
  source 1..80: mol_type = other DNA
cgcgaggaaagcccctcgttaaacttgggattttcacggggactcagtccagaggaagttgagaaaaccaacttaaatta

SEQ ID NO: 55527 - DNA, 80 bp, synthetic construct
  source 1..80: mol_type = other DNA
ggaattttatttgatgattagtctagcatcgtaatggtgtccttcgtgttgacgtgaaaacccagtcttccttcagttca

SEQ ID NO: 55528 - DNA, 80 bp, synthetic construct
  source 1..80: mol_type = other DNA
ccatgcatcgctgggccgatgatgaaaatgaagaagtcttctgatgaagcgagaccccggaagtgcagcttcaggcaaaa

SEQ ID NO: 55529 - DNA, 80 bp, synthetic construct
  source 1..80: mol_type = other DNA
agaccaggaaatcctctcacttacaatccatcaagagtagttcctccaaattgagtacaaagtctctaaaggccagcaga

SEQ ID NO: 55530 - DNA, 80 bp, synthetic construct; identical to SEQ ID NO: 14564
  source 1..80: mol_type = other DNA

SEQ ID NO: 55531 - DNA, 80 bp, synthetic construct
  source 1..80: mol_type = other DNA
ttaataagacacggagtcctgcttaccacccaggagacatattagcaaacaaaggggcacagcagaaatgtgtgtaaaat

SEQ ID NO: 55532 - DNA, 80 bp, synthetic construct
  source 1..80: mol_type = other DNA
ggacaggcttcgagggaagtgaaagtctttcggaattggtaaaatgggtgggtgacagatgaagcagagggctagggatg

SEQ ID NO: 55533 - DNA, 80 bp, synthetic construct
  source 1..80: mol_type = other DNA
agaaagcagcgtgggtaactgttagagtaacacagaccagacatgatggggctcgaattaaagtaggatcagggatctag

SEQ ID NO: 55534 - DNA, 80 bp, synthetic construct; identical to SEQ ID NO: 14565
  source 1..80: mol_type = other DNA

SEQ ID NO: 55535 - DNA, 80 bp, synthetic construct
  source 1..80: mol_type = other DNA
gtgaaagaaagaggcaagagaatagaaggagatgtgatattagaagcaaaaatcagaggaaagtgattgctggaaggggg

SEQ ID NO: 55536 - DNA, 80 bp, synthetic construct
  source 1..80: mol_type = other DNA
tttatttgagcaaagcacaattcatgaattgggcagcatccaggaccagaagaggtacagagagctccactgagcaatag

SEQ ID NO: 55537 - DNA, 80 bp, synthetic construct
  source 1..80: mol_type = other DNA
aagaatatgctcttaagttagggtacaattttcttacacattaagttagatttcagtatactacgtaggaattcaaagta

SEQ ID NO: 55538 - DNA, 80 bp, synthetic construct; identical to SEQ ID NO: 14566
  source 1..80: mol_type = other DNA

SEQ ID NO: 55539 - DNA, 80 bp, synthetic construct
  source 1..80: mol_type = other DNA
gcataacaagccctgtagaaatacagatgctccttgacttcaggtgggtttgtgtcctgataaactgcaagttgaaaatg

SEQ ID NO: 55540 - DNA, 80 bp, synthetic construct
  source 1..80: mol_type = other DNA
agactgacatttcaaatttgaagtacatttcttccagaatgtgtactgctttcacgccatcacagctgaacaatcttaag

SEQ ID NO: 55541 - DNA, 80 bp, synthetic construct
  source 1..80: mol_type = other DNA
tttttttaggcagagtcttgctctgtcacccaggctggagtgcagtgacatgatcttggctcactgcaggctccacctcc

SEQ ID NO: 55542 - DNA, 80 bp, synthetic construct; identical to SEQ ID NO: 14567
  source 1..80: mol_type = other DNA

SEQ ID NO: 55543 - DNA, 80 bp, synthetic construct
  source 1..80: mol_type = other DNA
aacttcaaaatgctcaggatattgtcaacagaggaaatagaaattgatcttctagcacaatagtcaaacaaaattgacta

SEQ ID NO: 55544 - DNA, 80 bp, synthetic construct
  source 1..80: mol_type = other DNA
aagctttccaagcatagaaataaactctgatagattatttcagatccaggatatttggaaaataaatcagattgcctttt

SEQ ID NO: 55545 - DNA, 80 bp, synthetic construct
  source 1..80: mol_type = other DNA
gctttaaggtataaggacatgtacccctggtgacagaggatgtataaatattgtgagtccaaatatataggccacttgtt

SEQ ID NO: 55546 - DNA, 80 bp, synthetic construct; identical to SEQ ID NO: 14568
  source 1..80: mol_type = other DNA

SEQ ID NO: 55547 - DNA, 80 bp, synthetic construct
  source 1..80: mol_type = other DNA
tgataaagagcatctgcaaaaaatcttacagctaacacagcggtgaaagactgaaatttttcccccaaagatcgggaaca

SEQ ID NO: 55548 - DNA, 80 bp, synthetic construct
  source 1..80: mol_type = other DNA
aagtctaatatgtaaaacataaagtcacaaaactctcaggagaaaatcttcaggatctaggattaagcaaaaagctttta

SEQ ID NO: 55549 - DNA, 80 bp, synthetic construct
  source 1..80: mol_type = other DNA
tgatataattgttgattcacagacacttttaagaaatgttacagagatatctcatgtacattttacccagtttcccccaa

SEQ ID NO: 55550 - DNA, 80 bp, synthetic construct
  source 1..80: mol_type = other DNA
ccacttccctcccatttccacttcttcattaacacagcaattattaatttccatctctatagttttggcattccaggagt

SEQ ID NO: 55551 - DNA, 80 bp, synthetic construct; identical to SEQ ID NO: 14569
  source 1..80: mol_type = other DNA

SEQ ID NO: 55552 - DNA, 80 bp, synthetic construct
  source 1..80: mol_type = other DNA
tgtgcctactttttatttttagccatcatgataggtatatagtaatatcttattgtggttttaatttgtaattctctaat

SEQ ID NO: 55553 - DNA, 80 bp, synthetic construct
  source 1..80: mol_type = other DNA
gccattttgatgatattgtttcttcctatccatgagcatgcaatgtttttccatttgtttgtgtcatttctgatttcatt

SEQ ID NO: 55554 - DNA, 80 bp, synthetic construct
  source 1..80: mol_type = other DNA
tgcacattgattttgtatcctgagaccttgctgaagttgtttatcaacttaagaagtttttgggctgagacgatagggtt

SEQ ID NO: 55555 - DNA, 80 bp, synthetic construct
  source 1..80: mol_type = other DNA
ccagttttcaaggggaatgcttccaggttttgcccattcagtatgatgttggctgcgggtttgtcatagatggctcttac

SEQ ID NO: 55556 - DNA, 80 bp, synthetic construct; identical to SEQ ID NO: 14570
  source 1..80: mol_type = other DNA

SEQ ID NO: 55557 - DNA, 80 bp, synthetic construct
  source 1..80: mol_type = other DNA
aaatagtttcagcaggaatggtaccatttcttctttgtacacctgatagaattcagctgtgaatccatttggtcctgggt

SEQ ID NO: 55558 - DNA, 80 bp, synthetic construct
  source 1..80: mol_type = other DNA
tatgtcatagaagtattcataatattctctgatggttgtctgtatttctgtggggtcagtggtaatacctcctttgtcat

SEQ ID NO: 55559 - DNA, 80 bp, synthetic construct
  source 1..80: mol_type = other DNA
tggttatttcttgtcttctgctagccttgagattggttggctgtgatactctagttcttttagttattatgttaggttgt

SEQ ID NO: 55560 - DNA, 80 bp, synthetic construct; identical to SEQ ID NO: 14571
  source 1..80: mol_type = other DNA

SEQ ID NO: 55561 - DNA, 80 bp, synthetic construct
  source 1..80: mol_type = other DNA
aagatgtctatcaggttcatttgatccagagctgagttcaggtcctgggtatctttgttaattttctgtcttgatgatct

SEQ ID NO: 55562 - DNA, 80 bp, synthetic construct
  source 1..80: mol_type = other DNA
ttaccattatgtaatgcccttcttcatcttttttgatctttgttggtttaaagtctgttttgtctgaaactagtattgca

SEQ ID NO: 55563 - DNA, 80 bp, synthetic construct
  source 1..80: mol_type = other DNA
tggggcactagcccatttacatttaagattagtattgatatgtgtggatttcatcctgtcatcatgatgttagctggtta

SEQ ID NO: 55564 - DNA, 80 bp, synthetic construct; identical to SEQ ID NO: 14572
  source 1..80: mol_type = other DNA

SEQ ID NO: 55565 - DNA, 80 bp, synthetic construct
  source 1..80: mol_type = other DNA
ataattatgtgcctttggaatgatcttcttgtgaagtatcttactggggttctctgcatttcctgtattttaatgttggc

SEQ ID NO: 55566 - DNA, 80 bp, synthetic construct
  source 1..80: mol_type = other DNA
attcttttttctctattcttgtctgactatcttatttcagaaagccagtcttgaagtgtggagattcttttttccactgg

SEQ ID NO: 55567 - DNA, 80 bp, synthetic construct
  source 1..80: mol_type = other DNA
atgtacttctgtagctcaatgatcttcatttctatccttattctgaattacatatctgtcatttcagccatctcagccca

SEQ ID NO: 55568 - DNA, 80 bp, synthetic construct; identical to SEQ ID NO: 14573
  source 1..80: mol_type = other DNA

SEQ ID NO: 55569 - DNA, 80 bp, synthetic construct
  source 1..80: mol_type = other DNA
ggaatccgctgtgatgggcggggggtgggggaggtggcaggagtggtgcagtccgaagtgctcccagaccactggtcact

SEQ ID NO: 55570 - DNA, 80 bp, synthetic construct
  source 1..80: mol_type = other DNA
gaggcaatgcaactgcaggaaaggaagggggtcccctgctggcaactgtgtgtgtggtcacacaggaagtggtgttggct

SEQ ID NO: 55571 - DNA, 80 bp, synthetic construct
  source 1..80: mol_type = other DNA
ctgcaatggctgtcaggagggaattggtggggggtgaattacactcctatatgctggtgaggcaaggaaaacaaaaccca

SEQ ID NO: 55572 - DNA, 80 bp, synthetic construct; identical to SEQ ID NO: 14574
  source 1..80: mol_type = other DNA

SEQ ID NO: 55573 - DNA, 80 bp, synthetic construct
  source 1..80: mol_type = other DNA
gggctaatgtctcctatgggagtaagttgagcctagggaaatggccatccctggccatgctccactgcagatgctcctgc

SEQ ID NO: 55574 - DNA, 80 bp, synthetic construct
  source 1..80: mol_type = other DNA
cacccattttcctggagccattggaggacaggaatgagtctggatgtgctgtagccccatgtagggctcccagctttctc

SEQ ID NO: 55575 - DNA, 80 bp, synthetic construct
  source 1..80: mol_type = other DNA
atctagtcagcgatcttgccctccccccaaccaagatacattccaataaaacttgtggatactaaagaaaaagaaaatac

SEQ ID NO: 55576 - DNA, 80 bp, synthetic construct
  source 1..80: mol_type = other DNA
aaccaagatttttatagccacaaaactgactttcgactatgaagtgcaagaacttcctggtgtggactgtatatgccgtc

SEQ ID NO: 55577 - DNA, 80 bp, synthetic construct; identical to SEQ ID NO: 14575
  source 1..80: mol_type = other DNA

SEQ ID NO: 55578 - DNA, 80 bp, synthetic construct
  source 1..80: mol_type = other DNA
tcttttgatatcaggatccctttttattcataaaattgttgagaacaccaagaagctttagtttacatgggttatgtaaa

SEQ ID NO: 55579 - DNA, 80 bp, synthetic construct
  source 1..80: mol_type = other DNA
tctggcttaataaagctagcttggttatatattcttctacattcaagctgtaacaatatgttgttttggctaaagcacaa

SEQ ID NO: 55580 - DNA, 80 bp, synthetic construct
  source 1..80: mol_type = other DNA
tattaacttttcatattctgttgtgttaaaattcactagtctatctttaaatggatctttatgcatgactttgcaatatc

SEQ ID NO: 55581 - DNA, 80 bp, synthetic construct; identical to SEQ ID NO: 14576
  source 1..80: mol_type = other DNA

SEQ ID NO: 55582 - DNA, 80 bp, synthetic construct
  source 1..80: mol_type = other DNA
tgcctttccatcagtatgcaccagaaatgctgcctatgttcttacactgactattaaacagatgtgtgcttgaggtttaa

SEQ ID NO: 55583 - DNA, 80 bp, synthetic construct
  source 1..80: mol_type = other DNA
gtgtcaccaccttgatttgtgctcaggcactaacagtttcacgtgaccaccatagatttctgtaccaatatgtaaataat

SEQ ID NO: 55584 - DNA, 80 bp, synthetic construct
  source 1..80: mol_type = other DNA
tgacagggatatcaacataaggaatgatggtgagcattaaacatatctctactcacagaactaagactaacaagggagca

SEQ ID NO: 55585 - DNA, 80 bp, synthetic construct; identical to SEQ ID NO: 14577
  source 1..80: mol_type = other DNA

SEQ ID NO: 55586 - DNA, 80 bp, synthetic construct
  source 1..80: mol_type = other DNA
aatcttggctcactgtaacctccacctcccaagttcaagcgcttctcttgcctcagcctcccgagtagctgggactacag

SEQ ID NO: 55587 - DNA, 80 bp, synthetic construct
  source 1..80: mol_type = other DNA
atttttttaaatgtatacatgtataaatgttttattgccattgaacaggctggacacaatgaccattcctatctatttag

SEQ ID NO: 55588 - DNA, 80 bp, synthetic construct
  source 1..80: mol_type = other DNA
ttgaacactcccaggcactgataaacgtatctaggttgtttctctaaacactgaaactttgtcccagccctgagccaggt

SEQ ID NO: 55589 - DNA, 80 bp, synthetic construct; identical to SEQ ID NO: 14578
  source 1..80: mol_type = other DNA

SEQ ID NO: 55590 - DNA, 80 bp, synthetic construct
  source 1..80: mol_type = other DNA
tcatcccagataacaaagaaattatcaaaagaaatttgcgtcaaaagaactcagtttcatttttagccacttgaagaagt

SEQ ID NO: 55591 - DNA, 80 bp, synthetic construct
  source 1..80: mol_type = other DNA
aatttgctaacttgaaaactggtaaataaaaggagagtcaaacactgatcctgcctttccactgtaccactaagtagccc

SEQ ID NO: 55592 - DNA, 80 bp, synthetic construct
  source 1..80: mol_type = other DNA
aacatcacaaaaagaaacagctggaaattatgtctctcatggtgaaaggccacaacaccacgtatagattttccaaagga

SEQ ID NO: 55593 - DNA, 80 bp, synthetic construct; identical to SEQ ID NO: 14579
  source 1..80: mol_type = other DNA

SEQ ID NO: 55594 - DNA, 80 bp, synthetic construct
  source 1..80: mol_type = other DNA
acttccgctggagctggcaaagtcctgttccttgacttgattacaggggtttttcttaaataattcactaaaatgtacat

SEQ ID NO: 55595 - DNA, 80 bp, synthetic construct
  source 1..80: mol_type = other DNA
ctttggagatcatgacttataggagtagggctggaccacagaaaagtaaatgatttggggctggaaggagtaaggtctca

SEQ ID NO: 55596 - DNA, 80 bp, synthetic construct
  source 1..80: mol_type = other DNA
tgacctcatgaatgtcctttacctcacccagggcccagactactcatcactacttcaggctccagagagagaagcttcag

SEQ ID NO: 55597 - DNA, 80 bp, synthetic construct; identical to SEQ ID NO: 14580
  source 1..80: mol_type = other DNA

SEQ ID NO: 55598 - DNA, 80 bp, synthetic construct
  source 1..80: mol_type = other DNA
tctgcttatcccatttctagcttcagaaaaaaattatcccggtgatccctgagaggcacaatcagctttccttgcctcag

SEQ ID NO: 55599 - DNA, 80 bp, synthetic construct
  source 1..80: mol_type = other DNA
tctccaagaatattcagactgagctcctatgggaaacaggtctttaaattagtaaaaatatcccaatatttaaagcactt

SEQ ID NO: 55600 - DNA, 80 bp, synthetic construct
  source 1..80: mol_type = other DNA
ttacagattctcacagcccataagaatgcctcctaaatactaagaccaaagaattagaggacaccagttcatagggttgg

SEQ ID NO: 55601 - DNA, 80 bp, synthetic construct
  source 1..80: mol_type = other DNA
ggaaagaataattcatgttgtgaccaagataaacgcagaagtgacacaggctctgtattgagtcagtatagtcctgagtc

SEQ ID NO: 55602 - DNA, 80 bp, synthetic construct; identical to SEQ ID NO: 14581
  source 1..80: mol_type = other DNA

SEQ ID NO: 55603 - DNA, 80 bp, synthetic construct
  source 1..80: mol_type = other DNA
tctctttcccagatcacccaagtgaacacaaagtataggcaagtctcagcccccaagatcagtaacagggtatgtcaatg

SEQ ID NO: 55604 - DNA, 80 bp, synthetic construct
  source 1..80: mol_type = other DNA
ctacacagacaaccatttatcctaaagcagaaaattgcttgtaagaaagaagagccatggccaggttcacatgggggaca

SEQ ID NO: 55605 - DNA, 80 bp, synthetic construct
  source 1..80: mol_type = other DNA
cagcttggtcaatgccacaaacatccccacatcactgtcgaaacgtacatactcctccaagttaaagatgaatctgacca

SEQ ID NO: 55606 - DNA, 80 bp, synthetic construct; identical to SEQ ID NO: 14582
  source 1..80: mol_type = other DNA

SEQ ID NO: 55607 - DNA, 80 bp, synthetic construct
  source 1..80: mol_type = other DNA
gccaataattacaatgtgctgtgaactcattgggtaaaattaaaccaatcctatgcacttaagaacaacaactacaataa

SEQ ID NO: 55608 - DNA, 80 bp, synthetic construct
  source 1..80: mol_type = other DNA
cataagaatgaccttcctgggtgaaccccacttatccctcactcagtagctaatttcagatgaagttccagcctgtaatt

SEQ ID NO: 55609 - DNA, 80 bp, synthetic construct
  source 1..80: mol_type = other DNA
gatctctcctggccaggtttgttcctcttttgtatttaatgaaactaacatgcaaaggggattctgttcttagcacatta

SEQ ID NO: 55610 - DNA, 80 bp, synthetic construct; identical to SEQ ID NO: 14583
  source 1..80: mol_type = other DNA

SEQ ID NO: 55611 - DNA, 80 bp, synthetic construct
  source 1..80: mol_type = other DNA
ttcaacacgcccaggcactgactgaggttgatacacacaataaggatcctaaacaagacacaatgtttccctcttcctgc

SEQ ID NO: 55612 - DNA, 80 bp, synthetic construct
  source 1..80: mol_type = other DNA
ctggtctgtggcctggacttacaaagaaaggcatcactcccccatgccaattcttgcatacacactggaaaaaaacaatt

SEQ ID NO: 55613 - DNA, 80 bp, synthetic construct
  source 1..80: mol_type = other DNA
cataaaattcagtcagaaagtacccattaagagtataaatcgctgtttttctggcttccccaggattggaaactcctcag

SEQ ID NO: 55614 - DNA, 80 bp, synthetic construct
  source 1..80: mol_type = other DNA
tgtttgacatattatggggccctagaagaactaggcagactgtttattatgtattcttctattccctggcctgttctgac

SEQ ID NO: 55615 - DNA, 80 bp, synthetic construct; identical to SEQ ID NO: 14584
  source 1..80: mol_type = other DNA

SEQ ID NO: 55616 - DNA, 80 bp, synthetic construct
  source 1..80: mol_type = other DNA
accttcaagaggacagcagagtgttaaaggtagaagccatatttcaaaagaatgaattggaaacaagaaaacaaaggccg

SEQ ID NO: 55617 - DNA, 80 bp, synthetic construct
  source 1..80: mol_type = other DNA
aataattgtacatatttatggggtacagcatgatgttccaacacacctatacattgtgtattgatcaaatcagggtaatt

SEQ ID NO: 55618 - DNA, 80 bp, synthetic construct
  source 1..80: mol_type = other DNA
ctaaaaaagttgacctcatcgaagtaaagagtacgttaggagttaccagaggctggggagtcaggggtagaaatgggtag

SEQ ID NO: 55619 - DNA, 80 bp, synthetic construct; identical to SEQ ID NO: 14585
  source 1..80: mol_type = other DNA

SEQ ID NO: 55620 - DNA, 80 bp, synthetic construct
  source 1..80: mol_type = other DNA
agttagagacctgcctggaaaacatagtgagacccccatgtccaaataaaatttaaaaaattaaagaaataaacatggtg

SEQ ID NO: 55621 - DNA, 80 bp, synthetic construct
  source 1..80: mol_type = other DNA
atagaagggctggaggcaatagcttggcacttttgcccttctgccttcctccttgtgaggactgttacactggaatgatt

SEQ ID NO: 55622 - DNA, 80 bp, synthetic construct
  source 1..80: mol_type = other DNA
gggcaatgtttactcatcatttcacatcatctttcagcatgaaatgtgcccctgatttgcctatactgtgcatgttaaga

SEQ ID NO: 55623 - DNA, 80 bp, synthetic construct; identical to SEQ ID NO: 14586
  source 1..80: mol_type = other DNA

SEQ ID NO: 55624 - DNA, 80 bp, synthetic construct
  source 1..80: mol_type = other DNA
agtttttaaagttttaattaagcaggattcagaaaagagaggtgagatgcaattgtgcaaccttttactgttctatgacc

SEQ ID NO: 55625 - DNA, 80 bp, synthetic construct
  source 1..80: mol_type = other DNA
agacttcctactctcctggagctgtgtgactcgttctcaccaatggaaagtgaacaaaaggttcctggtcaaagaattta

SEQ ID NO: 55626 - DNA, 80 bp, synthetic construct
  source 1..80: mol_type = other DNA
tgaatgagaaacaactgttctttaaagaaggtactggcttggttaccacagcctggcctgacttgacttaactgctacag

SEQ ID NO: 55627 - DNA, 80 bp, synthetic construct; identical to SEQ ID NO: 14587
  source 1..80: mol_type = other DNA

SEQ ID NO: 55628 - DNA, 80 bp, synthetic construct
  source 1..80: mol_type = other DNA
tctttgtagacagcaccatggctggcttctgcagcttccctcagagctgaaggaagggccatgtggagaggagaggaagg

SEQ ID NO: 55629 - DNA, 80 bp, synthetic construct
  source 1..80: mol_type = other DNA
gttaggagggctgctctttcttctctgtaaatgtgtctaaggctcacaaactctaaaatctgacttgcctacataataat

SEQ ID NO: 55630 - DNA, 80 bp, synthetic construct
  source 1..80: mol_type = other DNA
tggaatgaaccaaagttcacataactagtaagtccctaggctatactttttctgtcacactgtatttcttgggaagccag

SEQ ID NO: 55631 - DNA, 80 bp, synthetic construct; identical to SEQ ID NO: 14588
  source 1..80: mol_type = other DNA

SEQ ID NO: 55632 - DNA, 80 bp, synthetic construct
  source 1..80: mol_type = other DNA
gatgtggttttcttcctttctcctgtatttatgtttttgtcttctacttgaacgagcctgaaaaatagggcagggtgttt

SEQ ID NO: 55633 - DNA, 80 bp, synthetic construct
  source 1..80: mol_type = other DNA
tgagggtggcataaaattattattctccctattgcctgacacaaatatcccttcaactgctattttggtgactttgacat

SEQ ID NO: 55634 - DNA, 80 bp, synthetic construct
  source 1..80: mol_type = other DNA
aattgaaggaattgtactaggctaagaattttgccagctcaaaatactggtttaattctttctcagtggtgattgacgtc

SEQ ID NO: 55635 - DNA, 80 bp, synthetic construct; identical to SEQ ID NO: 14589
  source 1..80: mol_type = other DNA

SEQ ID NO: 55636 - DNA, 80 bp, synthetic construct
  source 1..80: mol_type = other DNA
aaaaacaaaaaaaaccccttgatcttaatgggtgttttttaatctgtgctagaatctgtttgcaatgttttatttaggat

SEQ ID NO: 55637 - DNA, 80 bp, synthetic construct
  source 1..80: mol_type = other DNA
taatttttgtttgtttgtttgtttgttttagagacaaggcctcactctgttgcccaggctggagtgcagtggcacaatca

SEQ ID NO: 55638 - DNA, 80 bp, synthetic construct
  source 1..80: mol_type = other DNA
caatccgactgcttaggcctcccaaagtgctgggattataggtgtgagccactgcacccggcctctattttcaattttaa

SEQ ID NO: 55639 - DNA, 80 bp, synthetic construct
  source 1..80: mol_type = other DNA
ctcccagattcaagcaattctcctgcctcggcctcccaagtagctgggattacaggcgcccaccaccacacccagctaat

SEQ ID NO: 55640 - DNA, 80 bp, synthetic construct; identical to SEQ ID NO: 14590
  source 1..80: mol_type = other DNA

SEQ ID NO: 55641 - DNA, 80 bp, synthetic construct
  source 1..80: mol_type = other DNA
ttttttggtgaggagtgtctgaatttcatcttgtttggtaagacgaatgtgacctctgcttcccttttgtttgccttctc

SEQ ID NO: 55642 - DNA, 80 bp, synthetic construct
  source 1..80: mol_type = other DNA
tttataattattcatacagcaaatagattcagtctaattcagagatattaacttctgttaagtataatgtttacatgagt

SEQ ID NO: 55643 - DNA, 80 bp, synthetic construct
  source 1..80: mol_type = other DNA
taatgaacaatcacaaaactagctcatatcctctcccttcctctttctgtgtgtgtgtctacctttgtagtcttaaatgt

SEQ ID NO: 55644 - DNA, 80 bp, synthetic construct; identical to SEQ ID NO: 14591
  source 1..80: mol_type = other DNA

SEQ ID NO: 55645 - DNA, 80 bp, synthetic construct
  source 1..80: mol_type = other DNA
tcatgtttttaggtttcttgtgatcttatgaagggcatataactggattttgcgatattgttaatctaatctgagaactt

SEQ ID NO: 55646 - DNA, 80 bp, synthetic construct
  source 1..80: mol_type = other DNA
cttgcatcacttatattaaatcaattacatttttatttaaagtattatttaatttccccttactgatttaggaattttaa

SEQ ID NO: 55647 - DNA, 80 bp, synthetic construct
  source 1..80: mol_type = other DNA
ctttaactttgtctgcctcattctcatgtcacttgtggttgctctgccttatttttaaatttaatagtcatttttattac

SEQ ID NO: 55648 - DNA, 80 bp, synthetic construct; identical to SEQ ID NO: 14592
  source 1..80: mol_type = other DNA

SEQ ID NO: 55649 - DNA, 80 bp, synthetic construct
  source 1..80: mol_type = other DNA
gtatttttgcacatgtgcattacaatgtctatacaagactaactagcaacagcaaaagacttccaataacctaactagcc

SEQ ID NO: 55650 - DNA, 80 bp, synthetic construct
  source 1..80: mol_type = other DNA
cttaatacacagtaaacttctctggaaagataaacacaaagctggaagaacggattgcctatgcaagaggaattagcaaa

SEQ ID NO: 55651 - DNA, 80 bp, synthetic construct
  source 1..80: mol_type = other DNA
tttgaggagttttatgcaaagctgggcaagtccacctcttccttagctatgtgacccaggcaagttagtaaatgtttcta

SEQ ID NO: 55652 - DNA, 80 bp, synthetic construct; identical to SEQ ID NO: 14593
  source 1..80: mol_type = other DNA

SEQ ID NO: 55653 - DNA, 80 bp, synthetic construct
  source 1..80: mol_type = other DNA
gcatttcctgcttgtttcacaattgccatgtggattacaagtggctatccctgggtggaggcataaaggacttgaaactc

SEQ ID NO: 55654 - DNA, 80 bp, synthetic construct
  source 1..80: mol_type = other DNA
aaggggaaattacagggtaaggagatcaatcaaatggtgatggggggtaggagtgaacaaaaagaactctggagcaaacc

SEQ ID NO: 55655 - DNA, 80 bp, synthetic construct
  source 1..80: mol_type = other DNA
gtctactgcatcttcctgtactgcccatcaagataagttttccacccagctttatcatgattagctgcgtgatttcatgt

SEQ ID NO: 55656 - DNA, 80 bp, synthetic construct; identical to SEQ ID NO: 14594
  source 1..80: mol_type = other DNA

SEQ ID NO: 55657 - DNA, 80 bp, synthetic construct
  source 1..80: mol_type = other DNA
ccaaaacagcagttctggggaattcattgccagcactggaaactacctgctgtttccaggaatatgaaggtttctctttc

SEQ ID NO: 55658 - DNA, 80 bp, synthetic construct
  source 1..80: mol_type = other DNA
attcatttattcaattgactatttattctccactatgaattaggccctcggccaggtagcagatataaagcttaataaga

SEQ ID NO: 55659 - DNA, 80 bp, synthetic construct
  source 1..80: mol_type = other DNA
agacctgaaccctgagttaagtcttgaacttgaaaatcaggggcgagtcgagcagaaaatgggcaagaaaacaccatatg

SEQ ID NO: 55660 - DNA, 80 bp, synthetic construct
  source 1..80: mol_type = other DNA
tgagagcacctgaaggaatttccagaaatgccatcatcgtatgtgacacagaatttagaaaaatgactttgtgaagaatg

SEQ ID NO: 55661 - DNA, 80 bp, synthetic construct; identical to SEQ ID NO: 14595
  source 1..80: mol_type = other DNA

SEQ ID NO: 55662 - DNA, 80 bp, synthetic construct
  source 1..80: mol_type = other DNA
aaccaacctcatagggttggggataatgattaaaaacgataatacatgaaaaacacttagcatagctcctactcccatta

SEQ ID NO: 55663 - DNA, 80 bp, synthetic construct
  source 1..80: mol_type = other DNA
tggttaatttctatctcaaacaacagataaacgactgatgggacaggcagcaaaatagcaactatggttatctccaggaa

SEQ ID NO: 55664 - DNA, 80 bp, synthetic construct
  source 1..80: mol_type = other DNA
acaaaatactcctcatcaccaggcaaagctctagtcaccagggaattaagtttcctggacacagacagcccccaccccac

SEQ ID NO: 55665 - DNA, 80 bp, synthetic construct; identical to SEQ ID NO: 14596
  source 1..80: mol_type = other DNA

SEQ ID NO: 55666 - DNA, 80 bp, synthetic construct
  source 1..80: mol_type = other DNA
tccacctgggcaccatctcttatgatttagggtaaagaaggtgtgaaataaaagaaggtaggaaagggcagtagataaag

SEQ ID NO: 55667 - DNA, 80 bp, synthetic construct
  source 1..80: mol_type = other DNA
ctgtttccactagtaggtccttcgtcctccctctgcccaattctgcacagtctgatcctcccagcatgcccctcccaggc

SEQ ID NO: 55668 - DNA, 80 bp, synthetic construct
  source 1..80: mol_type = other DNA
cccctacatctgaggaaatcagagaaattcccttcctcagatacaagtgacacagacaacacacaaggagggacaagtgc

SEQ ID NO: 55669 - DNA, 80 bp, synthetic construct; identical to SEQ ID NO: 14597
  source 1..80: mol_type = other DNA

SEQ ID NO: 55670 - DNA, 80 bp, synthetic construct
  source 1..80: mol_type = other DNA
cttcgcagctctgcagcccataagcaatgttgttcctcacagaaccggagaacagcacaggctcctgcccaactgaaacc

SEQ ID NO: 55671 - DNA, 80 bp, synthetic construct
  source 1..80: mol_type = other DNA
cttctccctcctcacccacctggctgtgcaggtagcagtgttcatactgtgagatgggcttttcatccagcagcacctgt

SEQ ID NO: 55672 - DNA, 80 bp, synthetic construct
  source 1..80: mol_type = other DNA
atccctccatttctcttcttagcagaggcaagaccaggttctcagaggcaaatgaactataggctgtgatgtccaattat

SEQ ID NO: 55673 - DNA, 80 bp, synthetic construct; identical to SEQ ID NO: 14598
  source 1..80: mol_type = other DNA

SEQ ID NO: 55674 - DNA, 80 bp, synthetic construct
  source 1..80: mol_type = other DNA
ctccacttttaaatgtacaatttggacggaatttaaaagtggcaccaataccccagtgttccaatttgcaatataaagga

SEQ ID NO: 55675 - DNA, 80 bp, synthetic construct
  source 1..80: mol_type = other DNA
cccagcgcagttctctacacaaaaaagatgtttatcaagtgtctaggaaaatgtttaaataaagccctggatgaagtagc

SEQ ID NO: 55676 - DNA, 80 bp, synthetic construct
  source 1..80: mol_type = other DNA
ttcagctaatacatgaagaatgatagagtatctcccttttgcagccctaattctgtcatggatgtaggtactgctcatca

SEQ ID NO: 55677 - DNA, 80 bp, synthetic construct
  source 1..80: mol_type = other DNA
agcttctaggtttatctatcaatagacaggaagtacagaggcagaagagcatataataccacagggattcagtcaacaaa

SEQ ID NO: 55678 - DNA, 80 bp, synthetic construct; identical to SEQ ID NO: 14599
  source 1..80: mol_type = other DNA

SEQ ID NO: 55679 - DNA, 80 bp, synthetic construct
  source 1..80: mol_type = other DNA
ggatttgcttcagaataatatgggtggggggaagtggctggggatacagatccaacaagattgggcatgagttgatcatt

SEQ ID NO: 55680 - DNA, 80 bp, synthetic construct
  source 1..80: mol_type = other DNA
aaaagaacaaataaagcccaaggcccaggagtccacaaagaaaaagagagggaaaaaaggagagcaggcttggcttctcg

SEQ ID NO: 55681 - DNA, 80 bp, synthetic construct
  source 1..80: mol_type = other DNA
gctgggaatcttcccattctttccccctctctgcctctatgagactgagctgcaaaggcctctagaaccagctgtagttt

SEQ ID NO: 55682 - DNA, 80 bp, synthetic construct
  source 1..80: mol_type = other DNA
tgttcaagggcctctttatagcgacagacttcatgctcctcggccccaaaactgcgaacggtctgcagccctccaacggc

SEQ ID NO: 55683 - DNA, 80 bp, synthetic construct; identical to SEQ ID NO: 14600
  source 1..80: mol_type = other DNA

SEQ ID NO: 55684 - DNA, 80 bp, synthetic construct
  source 1..80: mol_type = other DNA
ctgaatcaggaaagaagggtagttttcccaaggagccacagatagttaagaaaggtggagatgtaattccaaatggatca

SEQ ID NO: 55685 - DNA, 80 bp, synthetic construct
  source 1..80: mol_type = other DNA
gcatcaaagaactctagcaacagagtgaaaaagcaaccatgaaatacaagaaaatatttgtgaatcatatatctgatagg

SEQ ID NO: 55686 - DNA, 80 bp, synthetic construct
  source 1..80: mol_type = other DNA
aaaccacaatgagataatcctaatcacctaatcaccattagaatggctattaaaaaaaaagacaacagaaagtggtgttg

SEQ ID NO: 55687 - DNA, 80 bp, synthetic construct
  source 1..80: mol_type = other DNA
aggtaattgaatcatgagggcaagtctttcccatgctgttcttgtgatattgaataagtctcacgagatataatggtttt

SEQ ID NO: 55688 - DNA, 80 bp, synthetic construct; identical to SEQ ID NO: 14601
  source 1..80: mol_type = other DNA

SEQ ID NO: 55689 - DNA, 80 bp, synthetic construct
  source 1..80: mol_type = other DNA
agaatattattcagccttaaaagggaggaaattctaacacatgctacaatatggatgaggcctgaagacattacgctaag

SEQ ID NO: 55690 - DNA, 80 bp, synthetic construct
  source 1..80: mol_type = other DNA
attttaggaagatgaaaaaagttctggagatggatggtgatgatggttacccaataacaatgtgggtttcctaaatgtca

SEQ ID NO: 55691 - DNA, 80 bp, synthetic construct
  source 1..80: mol_type = other DNA
ttaaagggaaaatctccctgcctaaaagcctctaagaaaccatttttaatcttcgcagtgggggcgggggatgtacagac

SEQ ID NO: 55692 - DNA, 80 bp, synthetic construct; identical to SEQ ID NO: 14602
  source 1..80: mol_type = other DNA

SEQ ID NO: 55693 - DNA, 80 bp, synthetic construct
  source 1..80: mol_type = other DNA
aagccatacagccccaccactttcaccaggcttcgcaagagcacattggcatttaaaggaagccagttactcatcagggt

SEQ ID NO: 55694 - DNA, 80 bp, synthetic construct
  source 1..80: mol_type = other DNA
agccccctcctctgaacatcctccttcacttgcagagggacagtggaggctgcttctccaccctgtcccaaacaagagaa

SEQ ID NO: 55695 - DNA, 80 bp, synthetic construct
  source 1..80: mol_type = other DNA
aggagaaaagctgctcccggatccgcaagttgattcgagacatggtgtaggtgaagcagcctcctcggcagcctgcagac

SEQ ID NO: 55696 - DNA, 80 bp, synthetic construct; identical to SEQ ID NO: 14603
  source 1..80: mol_type = other DNA

SEQ ID NO: 55697 - DNA, 80 bp, synthetic construct
  source 1..80: mol_type = other DNA
tctccttcctgccccatacccaaagcccttctctgtcatcatagatacttcatcatgggaactgcaataataaattccct

SEQ ID NO: 55698 - DNA, 80 bp, synthetic construct
  source 1..80: mol_type = other DNA
aaatttagttaccatattgaagaggcgtttgggagagtcagacatgatataatgagggtttgtactttaatgacagggat

SEQ ID NO: 55699 - DNA, 80 bp, synthetic construct
  source 1..80: mol_type = other DNA
ctcctaggctacaaatctgtacaacatataactgcacctaacactgtgggcgactgtaacacagaagtaagtatttgtgt

SEQ ID NO: 55700 - DNA, 80 bp, synthetic construct
  source 1..80: mol_type = other DNA
agaaagcagccaggatggaatgaaggcacaatgaaatggttttcgagggtactctaaattaagtatgaccataaaaatag

SEQ ID NO: 55701 - DNA, 80 bp, synthetic construct; identical to SEQ ID NO: 14604
  source 1..80: mol_type = other DNA

SEQ ID NO: 55702 - DNA, 80 bp, synthetic construct
  source 1..80: mol_type = other DNA
gaggcagaaagaaatggaatttcatggacctaggaatgttgagagacaactgagagacattccatctgagacttaaattc

SEQ ID NO: 55703 - DNA, 80 bp, synthetic construct
  source 1..80: mol_type = other DNA
cattcaccatattttagtttaagtatttttgtgttttgcgcctgaaagggcctagaaatggagttagggaagtgaagacc

SEQ ID NO: 55704 - DNA, 80 bp, synthetic construct
  source 1..80: mol_type = other DNA
gatgtcaatcacacgaccagaatagtgagggattaatgtctcacctgaaagaggcatgaaaaataacacaagaatgtgct

SEQ ID NO: 55705 - DNA, 80 bp, synthetic construct
  source 1..80: mol_type = other DNA
tgctccttctcctgggctccaggagggctcagaacagcccacagtgaccagctgagccccgcagccccgtaccccaccag

SEQ ID NO: 55706 - DNA, 80 bp, synthetic construct; identical to SEQ ID NO: 14605
  source 1..80: mol_type = other DNA

SEQ ID NO: 55707 - DNA, 80 bp, synthetic construct
  source 1..80: mol_type = other DNA
catcggcttctcattttatcctattcaaccctgagagctctcctgagtaaccggtgctcatccgtacacccctcctacga

SEQ ID NO: 55708 - DNA, 80 bp, synthetic construct
  source 1..80: mol_type = other DNA
ggactgggaagcaggagcgtggagtgggtagtcacttgggctgcgtccctgttggcgctccaggttcccctccgcaccaa

SEQ ID NO: 55709 - DNA, 80 bp, synthetic construct
  source 1..80: mol_type = other DNA
ccaaggccttcattctgggctgggccgccgggagggggcgcgcgagacccgcagacagcggaactggagcccgaactctg

SEQ ID NO: 55710 - DNA, 80 bp, synthetic construct; identical to SEQ ID NO: 14606
  source 1..80: mol_type = other DNA

SEQ ID NO: 55711 - DNA, 80 bp, synthetic construct
  source 1..80: mol_type = other DNA
aatacaaaaattagccagggcgtggtggcggacgcctgtaatcccagctactcgggaggctgaggcaggggaatcgcttg

SEQ ID NO: 55712 - DNA, 80 bp, synthetic construct
  source 1..80: mol_type = other DNA
accaatctcaccaggccaaaggggattttcacgtacagactttgaatttagtaggccctgagcgttcatcttcatccgtc

SEQ ID NO: 55713 - DNA, 80 bp, synthetic construct
  source 1..80: mol_type = other DNA
taaatatccttcctgacccagagccttcctatgcaacagaaagattcgtttattccagaaaggactcttcagattgaaac

SEQ ID NO: 55714 - DNA, 80 bp, synthetic construct; identical to SEQ ID NO: 14607
  source 1..80: mol_type = other DNA

SEQ ID NO: 55715 - DNA, 80 bp, synthetic construct
  source 1..80: mol_type = other DNA
ttcttcctctaaaattatagtcctgccatcttgcaattcagcatgacacatcatgaaattagacccttaatgtctgtctt

SEQ ID NO: 55716 - DNA, 80 bp, synthetic construct
  source 1..80: mol_type = other DNA
caatggaacacacaggagtccccaggtgcctctctatggaaaggaccctaacctatgtgaaattgcaaacaagtgtccat

SEQ ID NO: 55717 - DNA, 80 bp, synthetic construct
  source 1..80: mol_type = other DNA
cccaaccccattcagccacaagacagaggtatttataaccgtttttctttattctacttagtggggcacccagaaacttc

SEQ ID NO: 55718 - DNA, 80 bp, synthetic construct; identical to SEQ ID NO: 14608
  source 1..80: mol_type = other DNA

SEQ ID NO: 55719 - DNA, 80 bp, synthetic construct
  source 1..80: mol_type = other DNA
ctttaatgcccttcttctgactctgaaaatttcctccctactactctccctcctttgagtctctcaatcattttcttttt

SEQ ID NO: 55720 - DNA, 80 bp, synthetic construct
  source 1..80: mol_type = other DNA
ttgtagttttagtagagacggggtttcgccatgttggccaggctggtttctcaatcttaaatcaccccccccaccacccg

SEQ ID NO: 55721 - DNA, 80 bp, synthetic construct
  source 1..80: mol_type = other DNA
cgtaggcataagtgttcccactacccgtggagaacatatttcctgagagccgagtcccatgttcatccacgtagtagagt

SEQ ID NO: 55722 - DNA, 80 bp, synthetic construct; identical to SEQ ID NO: 14609
  source 1..80: mol_type = other DNA

SEQ ID NO: 55723 - DNA, 80 bp, synthetic construct
  source 1..80: mol_type = other DNA
ggagggagtaggagtatatgatgggaaacagatctgtcatccatagggaacatggtgggggaacatgaagaatggagagc

SEQ ID NO: 55724 - DNA, 80 bp, synthetic construct
  source 1..80: mol_type = other DNA
ggaaagagaggttagctctttccaacttgatggggcaggaaatgattaaagagataagcattggaaaggaattattttgt

SEQ ID NO: 55725 - DNA, 80 bp, synthetic construct
  source 1..80: mol_type = other DNA
gggtcttatcaccaaaaagctgttttgtgaaatatactattagcactaagatggaccacataggacaagagtaaggagca

SEQ ID NO: 55726 - DNA, 80 bp, synthetic construct
  source 1..80: mol_type = other DNA
catggtgccaagcaggtaagggttaatctcaatcaccttgttcacccgtaaggcacctggaagaagatggagctttggga

SEQ ID NO: 55727 - DNA, 80 bp, synthetic construct; identical to SEQ ID NO: 14610
  source 1..80: mol_type = other DNA

SEQ ID NO: 55728 - DNA, 80 bp, synthetic construct
  source 1..80: mol_type = other DNA
ttctgtagtaagaggctccaggaaaaggttttagggagtatgagggtgaggagatatgcagaaatgatctaaccatcaat

SEQ ID NO: 55729 - DNA, 80 bp, synthetic construct
  source 1..80: mol_type = other DNA
tcttccatgcataaagcattcaaccctcacaaaacacgtttagtaacagtatcctcactttacagaagaggggcttggga

SEQ ID NO: 55730 - DNA, 80 bp, synthetic construct
  source 1..80: mol_type = other DNA
agttctcttgtcttcctttgggagcccccacctcacctgtaactctttgtcctaacttgcacttcctcctctcaggcccc

SEQ ID NO: 55731 - DNA, 80 bp, synthetic construct; identical to SEQ ID NO: 14611
  source 1..80: mol_type = other DNA

SEQ ID NO: 55732 - DNA, 80 bp, synthetic construct
  source 1..80: mol_type = other DNA
cacatccccctgccttttccgagaaaaggacagttagtgcctggaccaggaccatcacactggggaccggcttctctgct

SEQ ID NO: 55733 - DNA, 80 bp, synthetic construct
  source 1..80: mol_type = other DNA
tctaaaggcgcagcttcaaccagaagactagaagtcagccaggagctgggagtagtgtcacgcggggtgggggttcctat

SEQ ID NO: 55734 - DNA, 80 bp, synthetic construct
  source 1..80: mol_type = other DNA
agggcccctccaggttcaacggtctcctaacctgtagtcacccacaagagcgtgccctttctgcccgcccttcctagcgt

SEQ ID NO: 55735 - DNA, 80 bp, synthetic construct; identical to SEQ ID NO: 14612
  source 1..80: mol_type = other DNA

SEQ ID NO: 55736 - DNA, 80 bp, synthetic construct
  source 1..80: mol_type = other DNA
agtggaaggggcctcataggaattaaaaagcttaagggaaaaggtgatgcagttagggggtaaaacattgaggatgataa

SEQ ID NO: 55737 - DNA, 80 bp, synthetic construct
  source 1..80: mol_type = other DNA
agggtgtttatgggccagcatatgccttcagttatgttgaaaatagctgatcatctttccgtacattctgaacatttctc

SEQ ID NO: 55738 - DNA, 80 bp, synthetic construct
  source 1..80: mol_type = other DNA
ctggaggcagctgcctactctgcagctgtggttctccaccacagagagaagaaaagggagggagatggagtgcgcaggtc

SEQ ID NO: 55739 - DNA, 80 bp, synthetic construct; identical to SEQ ID NO: 14613
  source 1..80: mol_type = other DNA

SEQ ID NO: 55740 - DNA, 80 bp, synthetic construct
  source 1..80: mol_type = other DNA
ttacatgaagggtgcaaaagtaggataaaaatgagaaccctagggtgaaacacgtgacagaagaataaagactattgaat

SEQ ID NO: 55741 - DNA, 80 bp, synthetic construct
  source 1..80: mol_type = other DNA
acctcttttaacctccattttgtcatctgtagaatgatgataaatgcctagctcagaaggattcctaatgaataaatgag

SEQ ID NO: 55742 - DNA, 80 bp, synthetic construct
  source 1..80: mol_type = other DNA
gctgtctgtacaaaaaataatttttttaaataaacgatattatgaggatggtcttttccttatgtttcgctttagaaatt

SEQ ID NO: 55743 - DNA, 80 bp, synthetic construct; identical to SEQ ID NO: 14614
  source 1..80: mol_type = other DNA

SEQ ID NO: 55744 - DNA, 80 bp, synthetic construct
  source 1..80: mol_type = other DNA
gcatccaatggaactggatttgggaactgagaactgcaaggactggtttgtataattatgatgttagtaaaactaacaga

SEQ ID NO: 55745 - DNA, 80 bp, synthetic construct
  source 1..80: mol_type = other DNA
tgaccccctgacagctggctcccagcctcgtctacctctgcagagcaaagggccaagatgagaacggtatagccacatgt

SEQ ID NO: 55746 - DNA, 80 bp, synthetic construct
  source 1..80: mol_type = other DNA
aaattgatgtccatgagtaaggaggaactgaaggataaaggcaagactactggggtttcagcaaaggtaaagatggctgg

SEQ ID NO: 55747 - DNA, 80 bp, synthetic construct; identical to SEQ ID NO: 14615
  source 1..80: mol_type = other DNA

SEQ ID NO: 55748 - DNA, 80 bp, synthetic construct
  source 1..80: mol_type = other DNA
ctgccctccttcaagccacctgcttccatacctgcctgtgcaggtagcggtgctcatattggggaaggggcttcccatcc

SEQ ID NO: 55749 - DNA, 80 bp, synthetic construct
  source 1..80: mol_type = other DNA
aaggcctctaaccttgagagtgtcattgccttgttacatagcatgatgtcttaccccagaagaaaaacagggaaatatag

SEQ ID NO: 55750 - DNA, 80 bp, synthetic construct
  source 1..80: mol_type = other DNA
aaaggaaaaggaaagatggaagaccgaagacacagattttgctgcagcaattccttggaacgtgagagcactctcttcga

SEQ ID NO: 55751 - DNA, 80 bp, synthetic construct; identical to SEQ ID NO: 14616
  source 1..80: mol_type = other DNA

SEQ ID NO: 55752 - DNA, 80 bp, synthetic construct
  source 1..80: mol_type = other DNA
gaggtaagaatagtgaaagtgaggtagtctgcttgccagcattatgtgaagcaagaagggtaaagaatggaaggacatca

SEQ ID NO: 55753 - DNA, 80 bp, synthetic construct
  source 1..80: mol_type = other DNA
ggattcccactttcagcagcatacctgaaatctataaagagaccacaaaaaaagggactgaggtagagaaatctggaggg

SEQ ID NO: 55754 - DNA, 80 bp, synthetic construct
  source 1..80: mol_type = other DNA
accactatcaccttgtctggggagcattttactcttcacaaaaggctttcattcatgtgatgtcagctaatacatgaaga

SEQ ID NO: 55755 - DNA, 80 bp, synthetic construct
  source 1..80: mol_type = other DNA
cgtctctactaaaaatacaaaaaaaaaaaaaaaattagccgggcgtggtggcgggtgcctgtagtcccagctactcagga

SEQ ID NO: 55756 - DNA, 80 bp, synthetic construct; identical to SEQ ID NO: 14617
  source 1..80: mol_type = other DNA

SEQ ID NO: 55757 - DNA, 80 bp, synthetic construct
  source 1..80: mol_type = other DNA
aaggccctaggactggaagacacgcatctctccaatccacatggttgggtggattttatgtaccatactgaaaggaagcc

SEQ ID NO: 55758 - DNA, 80 bp, synthetic construct
  source 1..80: mol_type = other DNA
aagggaatgggtattcatcttcaggtgctcacactagtggtccaggagttgactgcataggccacagcctccttctggtt

SEQ ID NO: 55759 - DNA, 80 bp, synthetic construct
  source 1..80: mol_type = other DNA
atggacaagagatgtcacacgggttggcaaaccatcagggacactaatacctgagttacctatttggaaattaaaggtga

SEQ ID NO: 55760 - DNA, 80 bp, synthetic construct; identical to SEQ ID NO: 14618
  source 1..80: mol_type = other DNA

SEQ ID NO: 55761 - DNA, 80 bp, synthetic construct
  source 1..80: mol_type = other DNA
aactccatgaacatacctggtaccattttcccaccttcttgggcagaaggaaaagcagaggcagggtgatcagggtgacc

SEQ ID NO: 55762 - DNA, 80 bp, synthetic construct
  source 1..80: mol_type = other DNA
gagagtgaggtgaatcagacaggttccaagtgatgagacgaactaacaatgagccaggatgccagggtcaggggtgtcaa

SEQ ID NO: 55763 - DNA, 80 bp, synthetic construct
  source 1..80: mol_type = other DNA
tcattaatgcacatgtgaatttccattttcctgaaagctttctgttccctagagaacctgtatgtcccatgctatacaca

SEQ ID NO: 55764 - DNA, 80 bp, synthetic construct; identical to SEQ ID NO: 14619
  source 1..80: mol_type = other DNA

SEQ ID NO: 55765 - DNA, 80 bp, synthetic construct
  source 1..80: mol_type = other DNA
tagatttataagaaaatgctagatgaaaactctaggtttttcttaaggtaaggaggacaatattttgctcctgaggtata

SEQ ID NO: 55766 - DNA, 80 bp, synthetic construct
  source 1..80: mol_type = other DNA
aagcagatgtatgaggatatgaacagtacatggcgtataatgaaagagtttcaggagaaacctgtctggttctgttggaa

SEQ ID NO: 55767 - DNA, 80 bp, synthetic construct
  source 1..80: mol_type = other DNA
aacccggaaaaaaaggggatcagggtgtgttcagggaacagactgaaggtcccaggtatccccatataagtgcatttcgg

SEQ ID NO: 55768 - DNA, 80 bp, synthetic construct; identical to SEQ ID NO: 14620
  source 1..80: mol_type = other DNA

SEQ ID NO: 55769 - DNA, 80 bp, synthetic construct
  source 1..80: mol_type = other DNA
tctaccagaactttcaggattttattaggaaggctggagatcatgaagtagaaaagcctcctgttagagatgaggatgcc

SEQ ID NO: 55770 - DNA, 80 bp, synthetic construct
  source 1..80: mol_type = other DNA
ctcctgctccacatttcccagaacccacgctactctaccttactgacaattacctttgattcctgtcccagtccccttgt

SEQ ID NO: 55771 - DNA, 80 bp, synthetic construct
  source 1..80: mol_type = other DNA
gtttgtgccacagggctgctgcgggcagtgccgctgcataactgacaacgaaggcggtagggtgacttccccagtgcagt

SEQ ID NO: 55772 - DNA, 80 bp, synthetic construct; identical to SEQ ID NO: 14621
  source 1..80: mol_type = other DNA

SEQ ID NO: 55773 - DNA, 80 bp, synthetic construct
  source 1..80: mol_type = other DNA
cggggagcgggacacctagagctagccattggcactcggacgccgtcccggtcccggccgggcctgggactctccgcgcc

SEQ ID NO: 55774 - DNA, 80 bp, synthetic construct
  source 1..80: mol_type = other DNA
tgctcactagataacgcctacttccaaaagtggcctgcccagactattttggtagcaagcgtggaaatcagatctgagaa

SEQ ID NO: 55775 - DNA, 80 bp, synthetic construct
  source 1..80: mol_type = other DNA
cgccgcgcgcaaagcagccccgcagcacccaggcgcctcctggcggcgccgcgaaggggcggggctgtcggctgcgcgtt

SEQ ID NO: 55776 - DNA, 80 bp, synthetic construct; identical to SEQ ID NO: 14622
  source 1..80: mol_type = other DNA

SEQ ID NO: 55777 - DNA, 80 bp, synthetic construct
  source 1..80: mol_type = other DNA
gcgctttcgctttcactctggtcccggacagtgggggctggttaaatcaagaaagggggttggggatggtgcaaagagat

SEQ ID NO: 55778 - DNA, 80 bp, synthetic construct
  source 1..80: mol_type = other DNA
gcccaagcactgataatgggcgttctgtgttaactagtgatgcccttccctagcttgacccaggaaggcctctccttggc

SEQ ID NO: 55779 - DNA, 80 bp, synthetic construct
  source 1..80: mol_type = other DNA
cggctttgttagagaggaatagcctctaacttgaagttaaccctgttctttgaccctctattcatgataagtcggtccgt

SEQ ID NO: 55780 - DNA, 80 bp, synthetic construct; identical to SEQ ID NO: 14623
  source 1..80: mol_type = other DNA

SEQ ID NO: 55781 - DNA, 80 bp, synthetic construct
  source 1..80: mol_type = other DNA
tgctgagatatgtatttacctcttgatcggaaattccataactgaaacttttattttcaaccatctgtatgtgttccttg

SEQ ID NO: 55782 - DNA, 80 bp, synthetic construct
  source 1..80: mol_type = other DNA
gatcatagtcaattactctgtgttgggtctacaccacatctgcacatactatgagcccttccgttggagataattttcac

SEQ ID NO: 55783 - DNA, 80 bp, synthetic construct
  source 1..80: mol_type = other DNA
aaagtggaaagatgaagggaaaaaaagcctgtactgacagtcagctctggcctgttactgtgtaatctttgagccagtca

SEQ ID NO: 55784 - DNA, 80 bp, synthetic construct; identical to SEQ ID NO: 14624
  source 1..80: mol_type = other DNA

SEQ ID NO: 55785 - DNA, 80 bp, synthetic construct
  source 1..80: mol_type = other DNA
atagggtctgagagggggacaggagatagatttttgagggtcttctttccatctgtgcttagggatcaaaaagatgattc

SEQ ID NO: 55786 - DNA, 80 bp, synthetic construct
  source 1..80: mol_type = other DNA
cattatgttccatagaacataactctctcaagattgttaatagcaaagaaaattgatgaggcatatttttcttaccttag

SEQ ID NO: 55787 - DNA, 80 bp, synthetic construct
  source 1..80: mol_type = other DNA
cttcatgctattctcttgtcaaagaaatttgagagacattgaatgatcaccctcaaaaattcctgagttctggttgggtg

SEQ ID NO: 55788 - DNA, 80 bp, synthetic construct; identical to SEQ ID NO: 14625
  source 1..80: mol_type = other DNA

SEQ ID NO: 55789 - DNA, 80 bp, synthetic construct
  source 1..80: mol_type = other DNA
tctctggttcagctgctgatgcccaagccgtggccgacatggccgcctaccagctggagctccatgggtatgaagctctg

SEQ ID NO: 55790 - DNA, 80 bp, synthetic construct
  source 1..80: mol_type = other DNA
tagtacctcatgagacggttattttgagaaccacattctatatgtgaacacagtttaaaagctgtaaatcactatcctga

SEQ ID NO: 55791 - DNA, 80 bp, synthetic construct
  source 1..80: mol_type = other DNA
gtccttgcagccaaaagaaagttatgtgggtggggctgagcaaaagagtgagcaattgaaagcttcttaccagttggtgg

SEQ ID NO: 55792 - DNA, 80 bp, synthetic construct; identical to SEQ ID NO: 14626
  source 1..80: mol_type = other DNA

SEQ ID NO: 55793 - DNA, 80 bp, synthetic construct
  source 1..80: mol_type = other DNA
cattctagcaatgagttccaaggacactacctctgaaagcatagtactttggggatatgagataccagggcttcattgca

SEQ ID NO: 55794 - DNA, 80 bp, synthetic construct
  source 1..80: mol_type = other DNA
cattggtggctccggcagcacctttatctatggttatgtggatgcagcatataagccaggcatgtctcccgaggagtgca

SEQ ID NO: 55795 - DNA, 80 bp, synthetic construct
  source 1..80: mol_type = other DNA
aggacaaatgcaaagctcaatggggttcttgggcaatacggataaaccagggctgttctgagtaaatcaaatgaggatac

SEQ ID NO: 55796 - DNA, 80 bp, synthetic construct; identical to SEQ ID NO: 14627
  source 1..80: mol_type = other DNA

SEQ ID NO: 55797 - DNA, 80 bp, synthetic construct
  source 1..80: mol_type = other DNA
gactgttaaatagtcaaggatttgtgaactgcttagctatttgtaacttgcaattcatcatagcgggagcatttacacca

SEQ ID NO: 55798 - DNA, 80 bp, synthetic construct
  source 1..80: mol_type = other DNA
ggaagatgagttttgaggtgaaagtggtagtaggcatatggatggagggggagtaaaaagatttttgaagctaagccatc

SEQ ID NO: 55799 - DNA, 80 bp, synthetic construct
  source 1..80: mol_type = other DNA
agtgaaccttccccagacttctctttcttattttgtaataaactctctagggccaaaacctggtatggtcattgggaaat

SEQ ID NO: 55800 - DNA, 80 bp, synthetic construct; identical to SEQ ID NO: 14628
  source 1..80: mol_type = other DNA

SEQ ID NO: 55801 - DNA, 80 bp, synthetic construct
  source 1..80: mol_type = other DNA
gcttaaatattttggggcacttgtgaatttcaaagaataatgacaataaccaaaagaagctacatttgtggcattggcta

SEQ ID NO: 55802 - DNA, 80 bp, synthetic construct
  source 1..80: mol_type = other DNA
aaatttaaaaattagtcgggtgcggtggtgcatgcctgtagtcccagctgcctgggaggctgagtgggaggatcgcttag

SEQ ID NO: 55803 - DNA, 80 bp, synthetic construct
  source 1..80: mol_type = other DNA
ggacacatagaggtttggaaagattaaatcacttgaccaaggtcacaaaataagttctgaggctgggatctgggattcag

SEQ ID NO: 55804 - DNA, 80 bp, synthetic construct; identical to SEQ ID NO: 14629
  source 1..80: mol_type = other DNA

SEQ ID NO: 55805 - DNA, 80 bp, synthetic construct
  source 1..80: mol_type = other DNA
atctaaaattacaaatgcctggagttgtttctagccatgatatttaacttatttgagattttaaatagcccatttttccc

SEQ ID NO: 55806 - DNA, 80 bp, synthetic construct
  source 1..80: mol_type = other DNA
ctctgccctgacgtcaggcctcaggtgcagagctgcactgcgtggtagcacaagccctgagttaacaagagaaataccgg

SEQ ID NO: 55807 - DNA, 80 bp, synthetic construct
  source 1..80: mol_type = other DNA
gggcacagcaaagactttgagaactgaatgaagattagatcttttaaaattggaagacttcggccaggcgcggtggctcg

SEQ ID NO: 55808 - DNA, 80 bp, synthetic construct
  source 1..80: mol_type = other DNA
gcagggagaatcgcttgaacccgggaggcaaaggtggcagtgagccaagattgcgccattgcactccacctggacgacaa

SEQ ID NO: 55809 - DNA, 80 bp, synthetic construct; identical to SEQ ID NO: 14630
  source 1..80: mol_type = other DNA

SEQ ID NO: 55810 - DNA, 80 bp, synthetic construct
  source 1..80: mol_type = other DNA
tatggaagtatttatactatagaaatcagcaatgctacaagtcagaagcattgtttttcttcagagagccggtttaacag

SEQ ID NO: 55811 - DNA, 80 bp, synthetic construct
  source 1..80: mol_type = other DNA
cacacagaacatttactcaaataggacatgcatcattccataaaggtaacgccaataaattccagagtatcggtatctta

SEQ ID NO: 55812 - DNA, 80 bp, synthetic construct
  source 1..80: mol_type = other DNA
cacctgtaatcccaactagtcagaaggctagacgggaggatcgcttgaacccaggaggcagaggttgcagtgagctgaga

SEQ ID NO: 55813 - DNA, 80 bp, synthetic construct; identical to SEQ ID NO: 14631
  source 1..80: mol_type = other DNA

SEQ ID NO: 55814 - DNA, 80 bp, synthetic construct
  source 1..80: mol_type = other DNA
acatttattagaacaagaaaagttaaaataaaggacctagaaattctactcaaaaatttggaaaaagagaagttgagcaa

SEQ ID NO: 55815 - DNA, 80 bp, synthetic construct
  source 1..80: mol_type = other DNA
ccgattatggataaagggagaaaaaatgaataaacaaatacataatgaaaaagggggaacagctacagatatgacacaga

SEQ ID NO: 55816 - DNA, 80 bp, synthetic construct
  source 1..80: mol_type = other DNA
tgactataccaatgagtattaaagcaatttttaaagttatcaatggcatctaataaaaaaatatatttttgaaaatgccc

SEQ ID NO: 55817 - DNA, 80 bp, synthetic construct
  source 1..80: mol_type = other DNA
taatcttgactccaaattgagttgtggaaaactcaaggaaaaaaaaataatagacccatttcaccttgaacacagatggg

SEQ ID NO: 55818 - DNA, 80 bp, synthetic construct; identical to SEQ ID NO: 14632
  source 1..80: mol_type = other DNA

SEQ ID NO: 55819 - DNA, 80 bp, synthetic construct
  source 1..80: mol_type = other DNA
catcaagatcaaatagggaatccttggaatactagggtggttcaatataataaaacatattgttgctataatttaccata

SEQ ID NO: 55820 - DNA, 80 bp, synthetic construct
  source 1..80: mol_type = other DNA
ataacggaaaaaccttgggtatccaagacaagaatgttcactataattactagcttatcatagcactaaagcctatgggc

SEQ ID NO: 55821 - DNA, 80 bp, synthetic construct
  source 1..80: mol_type = other DNA
actccagcctgggtgacaaaggaagaccgtatttctaaaaaataaaaaatacaaatacaactacaaactagcactagacc

SEQ ID NO: 55822 - DNA, 80 bp, synthetic construct; identical to SEQ ID NO: 14633
  source 1..80: mol_type = other DNA

SEQ ID NO: 55823 - DNA, 80 bp, synthetic construct
  source 1..80: mol_type = other DNA
tatctttggtcttccttaccaagttcttaactctgctggctctggggcactggacataccatgtaagaagaaaaatgttt

SEQ ID NO: 55824 - DNA, 80 bp, synthetic construct
  source 1..80: mol_type = other DNA
actctgttgacatagaagagggtggatttctcgaagaaacagccttctatagaaagtggcttgtatgagtcgggattctc

SEQ ID NO: 55825 - DNA, 80 bp, synthetic construct
  source 1..80: mol_type = other DNA
attccctcttccttggaggacctcagtctttgcccctaagaccttcaactgattggaagggccacttacattatggaggg

SEQ ID NO: 55826 - DNA, 80 bp, synthetic construct; identical to SEQ ID NO: 14634
  source 1..80: mol_type = other DNA

SEQ ID NO: 55827 - DNA, 80 bp, synthetic construct
  source 1..80: mol_type = other DNA
ctgccctcaagagcatacaaaggaaaaaaagacaaattaaaagcctttaatccaaactcaagacatgaatgaaaaactgt

SEQ ID NO: 55828 - DNA, 80 bp, synthetic construct
  source 1..80: mol_type = other DNA
gttgggatagaccggaccctgagatatgaaatagggacatatgagcagacacagagaagtctgagtgagaactatgaatc

SEQ ID NO: 55829 - DNA, 80 bp, synthetic construct
  source 1..80: mol_type = other DNA
atggtatcaattttaagtatcttgggggtgatgacagtattagggttttgcaggagaaatgtccttattcttaaattata

SEQ ID NO: 55830 - DNA, 80 bp, synthetic construct; identical to SEQ ID NO: 14635
  source 1..80: mol_type = other DNA

SEQ ID NO: 55831 - DNA, 80 bp, synthetic construct
  source 1..80: mol_type = other DNA
acctcacacctgtgatgtttactggctgcccatgggatttgaacacctttagagtactgtgaaatttcccctaccttttg

SEQ ID NO: 55832 - DNA, 80 bp, synthetic construct
  source 1..80: mol_type = other DNA
actgtatttatttctctggcaaaggtgacagaagaagcaactgtcttttggggaagcggtgggttttttccttttttttt

SEQ ID NO: 55833 - DNA, 80 bp, synthetic construct
  source 1..80: mol_type = other DNA
tctgaccctgtacatacatgtgcctctcatccgtagttccagcatttcctctctaaagtctagttctgagagaaatttct

SEQ ID NO: 55834 - DNA, 80 bp, synthetic construct
  source 1..80: mol_type = other DNA
aaaaacagagctgtatctctctgtgaggaaataatttctaggctagagattcaaaatggctaacgtgctagagggcaata

SEQ ID NO: 55835 - DNA, 80 bp, synthetic construct; identical to SEQ ID NO: 14636
  source 1..80: mol_type = other DNA

SEQ ID NO: 55836 - DNA, 80 bp, synthetic construct
  source 1..80: mol_type = other DNA
gcaaaatcttcttcaaaatgaatgtattgacagtcaccatgccagacttggagtacgaacaagagcatccttttaccctt

SEQ ID NO: 55837 - DNA, 80 bp, synthetic construct
  source 1..80: mol_type = other DNA
atataaaaatcatgccaaacacatctaattacttttagcttccttcacagtaggcggaggaaggtgaaaaattaagcctt

SEQ ID NO: 55838 - DNA, 80 bp, synthetic construct
  source 1..80: mol_type = other DNA
aggcaacaacaaaaaagaattttcagagaaactggtcacttaagtgcataggtacctgagagtgagcaattgttataact

SEQ ID NO: 55839 - DNA, 80 bp, synthetic construct; identical to SEQ ID NO: 14637
  source 1..80: mol_type = other DNA

SEQ ID NO: 55840 - DNA, 80 bp, synthetic construct
  source 1..80: mol_type = other DNA
ctttagttttaaaacgtagttaatcttatcaatacaatacatgaatgtatatccacactaagtttaccaccttaatttga

SEQ ID NO: 55841 - DNA, 80 bp, synthetic construct
  source 1..80: mol_type = other DNA
ctagctcagtgaaaattagtccaaagtaacaaaatcatttgaggctgcaaaacaacaatatcactattgatattaggagt

SEQ ID NO: 55842 - DNA, 80 bp, synthetic construct
  source 1..80: mol_type = other DNA
ttcccacaaaccactgacacactcattgacacagtgaatgagtctagtgacaagaaacaaatcctttttgttaggtcact

SEQ ID NO: 55843 - DNA, 80 bp, synthetic construct; identical to SEQ ID NO: 14638
  source 1..80: mol_type = other DNA

SEQ ID NO: 55844 - DNA, 80 bp, synthetic construct
  source 1..80: mol_type = other DNA
caaatgaggagcctagactttcaccctcaccaggctgtcataaggaacccaacacttcaacacacacatgcacacacacc

SEQ ID NO: 55845 - DNA, 80 bp, synthetic construct
  source 1..80: mol_type = other DNA
aacagtaatgaagcatctcttcccctctcctctagggtgatgtcagacaatgcctaatggagagtcaggattttcatcac

SEQ ID NO: 55846 - DNA, 80 bp, synthetic construct
  source 1..80: mol_type = other DNA
gaatttctgtccccactcagtaataatggggacctatctgaggtgtcaatgaaggcagagtgagaagcctggactcctac

SEQ ID NO: 55847 - DNA, 80 bp, synthetic construct; identical to SEQ ID NO: 14639
  source 1..80: mol_type = other DNA

SEQ ID NO: 55848 - DNA, 80 bp, synthetic construct
  source 1..80: mol_type = other DNA
attttagaactgaaaagtgcaatagccaaaataaaaagcccagtaaataagctcagcagcagaaggagagaacagaggaa

SEQ ID NO: 55849 - DNA, 80 bp, synthetic construct
  source 1..80: mol_type = other DNA
tttaatgttcatgtactcagagtcccaaaatgagaggaaaaagagagtgaagctgaaaaaaattatcaaataaatatggt

SEQ ID NO: 55850 - DNA, 80 bp, synthetic construct
  source 1..80: mol_type = other DNA
ctaacaggtgaaaaaaatgacagagcaaaattttcatcagaaactgtgtaagcccgaaggaggtcaccacctttttccag

SEQ ID NO: 55851 - DNA, 80 bp, synthetic construct; identical to SEQ ID NO: 14640
  source 1..80: mol_type = other DNA

SEQ ID NO: 55852 - DNA, 80 bp, synthetic construct
  source 1..80: mol_type = other DNA
ataatgtaatacctagaacaaccactaaaagagctatccaaagaggtacacacacatacacacacacagctatagataaa

SEQ ID NO: 55853 - DNA, 80 bp, synthetic construct
  source 1..80: mol_type = other DNA
agagacagagcttggcagaatagatttaaaaatatgactctgtcaggtgcggtggctcacgcctgtaatcccaacacttt

SEQ ID NO: 55854 - DNA, 80 bp, synthetic construct
  source 1..80: mol_type = other DNA
ccgggaggtggaggttgcagtgagctgagatcacaccacttcacaccgctgcactccagcctgggcaacagagcgagact

SEQ ID NO: 55855 - DNA, 80 bp, synthetic construct; identical to SEQ ID NO: 14641
  source 1..80: mol_type = other DNA

SEQ ID NO: 55856 - DNA, 80 bp, synthetic construct
  source 1..80: mol_type = other DNA
gaagaataaacaacatcaaaccataagatctaatcaacatttatagaacacaccacccaacaacagaagatacattattt

SEQ ID NO: 55857 - DNA, 80 bp, synthetic construct
  source 1..80: mol_type = other DNA
agtctagtacccattagttatttttcctgaccctctgcctcctcccaacctccaccctccaataggccccagtatgtgtt

SEQ ID NO: 55858 - DNA, 80 bp, synthetic construct
  source 1..80: mol_type = other DNA
tattccatggcagaatacactttttttttttttttttttgagatggagtttcactcttattgcccacactggagtacaat

SEQ ID NO: 55859 - DNA, 80 bp, synthetic construct
  source 1..80: mol_type = other DNA
atgaggtttcaccatgttgatcaggctggtctcaaactcctgacctcaggtgatccacccacctcagcctcccaaagtgc

SEQ ID NO: 55860 - DNA, 80 bp, synthetic construct; identical to SEQ ID NO: 14642
  source 1..80: mol_type = other DNA

SEQ ID NO: 55861 - DNA, 80 bp, synthetic construct
  source 1..80: mol_type = other DNA
aacatgtgccatggtggtttgctgcacatatcaacccatcacctaggtattaagacaagcatgcattagctatttttcct

SEQ ID NO: 55862 - DNA, 80 bp, synthetic construct
  source 1..80: mol_type = other DNA
gttttctgttcctgcattagtttgatgaggataatggcttccagcttcatccatgtctctgcaaataacaggatctcatt

SEQ ID NO: 55863 - DNA, 80 bp, synthetic construct
  source 1..80: mol_type = other DNA
tcctttgggtatatactcagtaatgggattgctgggtcaaatggtatttctggttctagatctttgaggaattgccacac

SEQ ID NO: 55864 - DNA, 80 bp, synthetic construct; identical to SEQ ID NO: 14643
  source 1..80: mol_type = other DNA

SEQ ID NO: 55865 - DNA, 80 bp, synthetic construct
  source 1..80: mol_type = other DNA
aagatagaagctaccaacatcagaaatgaaatgggatatcatcaaagattctacagacatcaaaaggataacaaaagaat

SEQ ID NO: 55866 - DNA, 80 bp, synthetic construct
  source 1..80: mol_type = other DNA
atatttaggaacaaatagtttcaatgaagaattctaccaaagatttaaagaagaattaacaccaattaatctcttccaga

SEQ ID NO: 55867 - DNA, 80 bp, synthetic construct
  source 1..80: mol_type = other DNA
acatataaaaagaattatatacaatgaccacgtgagagttatcccagggatgcaaagctggttggatattcacaattaat

SEQ ID NO: 55868 - DNA, 80 bp, synthetic construct; identical to SEQ ID NO: 14644
  source 1..80: mol_type = other DNA

SEQ ID NO: 55869 - DNA, 80 bp, synthetic construct
  source 1..80: mol_type = other DNA
cagaaaaacttctagatatgtgatttcagcaaattaacagaatacaggataaaccagtatcaattgtatttctacatact

SEQ ID NO: 55870 - DNA, 80 bp, synthetic construct
  source 1..80: mol_type = other DNA
ccggagtagctgggactacagacgcctaccaccatgcccggctaattttttgtatttttagtagagacggggtttcaccg

SEQ ID NO: 55871 - DNA, 80 bp, synthetic construct
  source 1..80: mol_type = other DNA
caaaacatgcaagacttgcaagctaaaaactatgtaatgctggtgaacgatatcaaagaagatctattcagtctctatct

SEQ ID NO: 55872 - DNA, 80 bp, synthetic construct; identical to SEQ ID NO: 14645
  source 1..80: mol_type = other DNA

SEQ ID NO: 55873 - DNA, 80 bp, synthetic construct
  source 1..80: mol_type = other DNA
ttcatttataccattatgccaaattgtagtcatccctgcagaattttagacaaatgaaaatggacaaggtaacaccaaag

SEQ ID NO: 55874 - DNA, 80 bp, synthetic construct
  source 1..80: mol_type = other DNA
gaaaatactttttctcagctgcatttgactacctaaaatcctaccgagcacgctgtttggcatgtcttactcctctgaaa

SEQ ID NO: 55875 - DNA, 80 bp, synthetic construct
  source 1..80: mol_type = other DNA
aacagctacttctactaaaagaagagtatgtggatactttctaagaactcaaaaacgagaaaaccaaaatcagagggtgc

SEQ ID NO: 55876 - DNA, 80 bp, synthetic construct; identical to SEQ ID NO: 14646
  source 1..80: mol_type = other DNA

SEQ ID NO: 55877 - DNA, 80 bp, synthetic construct
  source 1..80: mol_type = other DNA
ccatcagttgtatggctagaaatgaaaccatcactaaaccaagacacacagggctttcctgcacttagtttcaggaaaaa

SEQ ID NO: 55878 - DNA, 80 bp, synthetic construct
  source 1..80: mol_type = other DNA
aattctctcctcatgcaaaaaaaaaaaaaaaaaacctcaaaaaaaaaaaacctgttgttttcttaagtctaattaagcca

SEQ ID NO: 55879 - DNA, 80 bp, synthetic construct
  source 1..80: mol_type = other DNA
tcaatattgcagcaaatgacagaagagtgagcgaaagagttcctaatgtgtgacagtcttaatgattctttaaaaggtaa

SEQ ID NO: 55880 - DNA, 80 bp, synthetic construct; identical to SEQ ID NO: 14647
  source 1..80: mol_type = other DNA

SEQ ID NO: 55881 - DNA, 80 bp, synthetic construct
  source 1..80: mol_type = other DNA
cgcccaggctggagtgcagtggcacaatctcggctcactgcaagctccgcctcccgggttcacgccattctccctcctca

SEQ ID NO: 55882 - DNA, 80 bp, synthetic construct
  source 1..80: mol_type = other DNA
aggcgtgagccaccgcgcgaggtcacaatccttttcaattaaacagacaaatcaagttgaagacaagtgttaaaatacta

SEQ ID NO: 55883 - DNA, 80 bp, synthetic construct
  source 1..80: mol_type = other DNA
agttcccccccaaagatattgtttaacctctaaagcatgaaaagctatataatatacaaattaaccagtatttttacaaa

SEQ ID NO: 55884 - DNA, 80 bp, synthetic construct; identical to SEQ ID NO: 14648
  source 1..80: mol_type = other DNA

SEQ ID NO: 55885 - DNA, 80 bp, synthetic construct
  source 1..80: mol_type = other DNA
gtttgatattgagtccttcattgtagtgaagcgtccttctcatttcaaattgtcgctttttttctcgttcttcaggtgag

SEQ ID NO: 55886 - DNA, 80 bp, synthetic construct
  source 1..80: mol_type = other DNA
gtatcactacatgcatcttcatcatcacccatcgtactatggtaaggagtgcttggttcatctattttcattaaaccata

SEQ ID NO: 55887 - DNA, 80 bp, synthetic construct
  source 1..80: mol_type = other DNA
cgttgcgaggccgtggaggccgccattgccgggtgctccgcctgtcggctcagggtcgctgcttggcgtggggtccgcga

SEQ ID NO: 55888 - DNA, 80 bp, synthetic construct; identical to SEQ ID NO: 14649
  source 1..80: mol_type = other DNA

SEQ ID NO: 55889 - DNA, 80 bp, synthetic construct
  source 1..80: mol_type = other DNA
atagcctttttcacaaatagtgaattgaacaatggtgaaatggaacaattgggcatccataggcaagataataaaataaa

SEQ ID NO: 55890 - DNA, 80 bp, synthetic construct
  source 1..80: mol_type = other DNA
gtcccagctacttgggatgctgaggcagaaggattgcttgagcccaggagttcgaggctgtcataagctgtgacacacca

SEQ ID NO: 55891 - DNA, 80 bp, synthetic construct
  source 1..80: mol_type = other DNA
gaaaaatagaaaatatttgagatataggtctaggcgaagaattcttaggcttgacattgagagcatgatctatgaaagga

SEQ ID NO: 55892 - DNA, 80 bp, synthetic construct; identical to SEQ ID NO: 14650
  source 1..80: mol_type = other DNA

SEQ ID NO: 55893 - DNA, 80 bp, synthetic construct
  source 1..80: mol_type = other DNA
aatgggctgggtgcggtggctcacacctgtaatcccagcactttgtgaggccaaggtgggcagatgacctgaggtcggga

SEQ ID NO: 55894 - DNA, 80 bp, synthetic construct
  source 1..80: mol_type = other DNA
gcaccattgtacctagcctgggcaacaagagtgaaactctttctcaaaaaaaaaaaaaaaggcgacaatgctaaatgctg

SEQ ID NO: 55895 - DNA, 80 bp, synthetic construct
  source 1..80: mol_type = other DNA
caactgtactcctgggtatttagccccaagaaatgaaaacttgcatacacaaatacacaagcacagacaatgccttcaca

SEQ ID NO: 55896 - DNA, 80 bp, synthetic construct; identical to SEQ ID NO: 14651
  source 1..80: mol_type = other DNA

SEQ ID NO: 55897 - DNA, 80 bp, synthetic construct
  source 1..80: mol_type = other DNA
aggagaaaatctttgagatgtagggccaggcaaagaattcgtaggcttgacatcaaaagcataatccaggctgggcgtgg

SEQ ID NO: 55898 - DNA, 80 bp, synthetic construct
  source 1..80: mol_type = other DNA
agctaagcaagacggcacatgcttgtaatcccagctactcgggaggctgactcatgaacatcactcgaaccttggaggtg

SEQ ID NO: 55899 - DNA, 80 bp, synthetic construct
  source 1..80: mol_type = other DNA
atgacaaaagtacagaaatagagaaaaaattcatagttgccagtggttaaggaagtgatgggggtgggaaggaggtgaac

SEQ ID NO: 55900 - DNA, 80 bp, synthetic construct
  source 1..80: mol_type = other DNA
gtcaatatcctgattgcaatactgtactgaagtgttataagatgttaccatcagggaaactggattaaagggtaaaaggt

SEQ ID NO: 55901 - DNA, 80 bp, synthetic construct; identical to SEQ ID NO: 14652
  source 1..80: mol_type = other DNA

SEQ ID NO: 55902 - DNA, 80 bp, synthetic construct
  source 1..80: mol_type = other DNA
tcaccttggcctttgagagagaacaggaaagaagatggagaagaaggattttccctttgccccattttcctctttttggg

SEQ ID NO: 55903 - DNA, 80 bp, synthetic construct
  source 1..80: mol_type = other DNA
aggtcctaatatagctagtatccatataaaaagagattaggacatacatacacagggggcagtccataggaagatgcagg

SEQ ID NO: 55904 - DNA, 80 bp, synthetic construct
  source 1..80: mol_type = other DNA
ctaatacatcctcctatatttggacataggcctgtccttcttgattaaaggaatgtaaaaataagactgttgtcaaagtt

SEQ ID NO: 55905 - DNA, 80 bp, synthetic construct
  source 1..80: mol_type = other DNA
tacagatgtaagagatcacaggctccagtcatctaagggttctccaactagaaatagacctggtatggctgatgctacta

SEQ ID NO: 55906 - DNA, 80 bp, synthetic construct; identical to SEQ ID NO: 14653
  source 1..80: mol_type = other DNA

SEQ ID NO: 55907 - DNA, 80 bp, synthetic construct
  source 1..80: mol_type = other DNA
caccccgggttagcttctaatttgcttcacagcagtaaaggtcaacttttctttgcattacccaagagaaaacttagcca

SEQ ID NO: 55908 - DNA, 80 bp, synthetic construct
  source 1..80: mol_type = other DNA
ttcattcaaatttgtaatattccgtagaccagaaacagcacactctttgatcccatccttgtatgcccaaaatatctgag

SEQ ID NO: 55909 - DNA, 80 bp, synthetic construct
  source 1..80: mol_type = other DNA
agaaaattggctctaagattatccggagtacttcccaaatctattatttatggaacaagtgctgacttcagatatctagt

SEQ ID NO: 55910 - DNA, 80 bp, synthetic construct; identical to SEQ ID NO: 14654
  source 1..80: mol_type = other DNA

SEQ ID NO: 55911 - DNA, 80 bp, synthetic construct
  source 1..80: mol_type = other DNA
ggttttcaaatgtaaaattttaaatgaaaaatcttaatcttttggtcattgctgttttgctgtggtctgtctcccatggc

SEQ ID NO: 55912 - DNA, 80 bp, synthetic construct
  source 1..80: mol_type = other DNA
ctagaatggaatggggaggagggagaaacaaaggagaccttttactccgtacccttctgtatggtttgaacttgttgttt

SEQ ID NO: 55913 - DNA, 80 bp, synthetic construct
  source 1..80: mol_type = other DNA
tttgtgtttttagtagagacgggggtttcactgtgttaaccaggatggtctcaatctcctgaccttgtgatccgcccgcc

SEQ ID NO: 55914 - DNA, 80 bp, synthetic construct; identical to SEQ ID NO: 14655
  source 1..80: mol_type = other DNA

SEQ ID NO: 55915 - DNA, 80 bp, synthetic construct
  source 1..80: mol_type = other DNA
tacagcttttctgtaaactgggctgagatgtaccactaaatgaaattgaatgataggagtccattgtggttggaatagat

SEQ ID NO: 55916 - DNA, 80 bp, synthetic construct
  source 1..80: mol_type = other DNA
aaccatgagtgagctgcagcatccttacttaacctccaaacttaacctttgttgtaatatatatagaaaaatgagttccg

SEQ ID NO: 55917 - DNA, 80 bp, synthetic construct
  source 1..80: mol_type = other DNA
acccagatattcttatccgggagatgctatttctttttttccagaggccagaggtggtttttagtaaccacctgtatcat

SEQ ID NO: 55918 - DNA, 80 bp, synthetic construct; identical to SEQ ID NO: 14656
  source 1..80: mol_type = other DNA

SEQ ID NO: 55919 - DNA, 80 bp, synthetic construct
  source 1..80: mol_type = other DNA
ccacagcatttttctcactgttcattttcaaatttagtgtccaacctattactgtgtgcttttcttaatccctagaccaa

SEQ ID NO: 55920 - DNA, 80 bp, synthetic construct
  source 1..80: mol_type = other DNA
gttgcttcattacttctggagggaaatcttgctgctttctgtaaacatttttttctcatggcatatttatgtggaactgt

SEQ ID NO: 55921 - DNA, 80 bp, synthetic construct
  source 1..80: mol_type = other DNA
aacctcccaggttttacaaccgaaggaccaatcctttattactaacacgtaaactttatcttaaaatacgctgcatccat

SEQ ID NO: 55922 - DNA, 80 bp, synthetic construct; identical to SEQ ID NO: 14657
  source 1..80: mol_type = other DNA

SEQ ID NO: 55923 - DNA, 80 bp, synthetic construct
  source 1..80: mol_type = other DNA
cactaaaaatgaggttcttgtgtggttttctttttcattctctttgctgtactatatagagaaatgaattctgaactgaa

SEQ ID NO: 55924 - DNA, 80 bp, synthetic construct
  source 1..80: mol_type = other DNA
ttgtttttctatgtatgtgttttataccggtgagagaatatagcccgtgtagtttctaatttctatttaattttactttg

SEQ ID NO: 55925 - DNA, 80 bp, synthetic construct
  source 1..80: mol_type = other DNA
gctcttaaatgtgtcaatttatctttcctaacaaagcacatttttttccctaactttcaaagacttgtttaggatatgaa

SEQ ID NO: 55926 - DNA, 80 bp, synthetic construct; identical to SEQ ID NO: 14658
  source 1..80: mol_type = other DNA

SEQ ID NO: 55927 - DNA, 80 bp, synthetic construct
  source 1..80: mol_type = other DNA
tatgaggcagccagaagatttttgcaagatgcaggcctctcaaccttggatttcctagcctctaggactgtaataagtca

SEQ ID NO: 55928 - DNA, 80 bp, synthetic construct
  source 1..80: mol_type = other DNA
ctttttgtttgtttttgtttttattttgagacagggtctcagtctgccgctcaggctggagtgcaggggtgcgactacgg

SEQ ID NO: 55929 - DNA, 80 bp, synthetic construct
  source 1..80: mol_type = other DNA
tcaagtgatcctccctccttggcctcccaaagtgctgggattacaggtataagccattgccaccagcactttttgaatag

SEQ ID NO: 55930 - DNA, 80 bp, synthetic construct; identical to SEQ ID NO: 14659
  source 1..80: mol_type = other DNA

SEQ ID NO: 55931 - DNA, 80 bp, synthetic construct
  source 1..80: mol_type = other DNA
aacattaaagtttcctgtatttgtcttcccttagaatctcccttcctctctgcaaaatgcaactattattccaaatttgg

SEQ ID NO: 55932 - DNA, 80 bp, synthetic construct
  source 1..80: mol_type = other DNA
tgatcttgatgttgcatagaattccacattatgattatgccaaaatttgtgtatcagtttacctgcaaatggacactggg

SEQ ID NO: 55933 - DNA, 80 bp, synthetic construct
  source 1..80: mol_type = other DNA
tttttttccaagtagattatttcagtttgaagtccaccatcagagtatgagttcccctcaccctacatcctcattgattt

SEQ ID NO: 55934 - DNA, 80 bp, synthetic construct
  source 1..80: mol_type = other DNA
ggtcttttatatatccctttttgtgaactgccctttcacatcttttgatcattttcctatggggctattcttagatgttc

SEQ ID NO: 55935 - DNA, 80 bp, synthetic construct; identical to SEQ ID NO: 14660
  source 1..80: mol_type = other DNA

SEQ ID NO: 55936 - DNA, 80 bp, synthetic construct
  source 1..80: mol_type = other DNA
tattgaattatacatcctttacccactggtctttaatgaccattcttcacatacaaggggtcctgacactctttccattc

SEQ ID NO: 55937 - DNA, 80 bp, synthetic construct
  source 1..80: mol_type = other DNA
ttcaatggtattttggctcttcttgaacttgtgttccttcgtttcattttaatatcattgtgtccaattctataaaacat

SEQ ID NO: 55938 - DNA, 80 bp, synthetic construct
  source 1..80: mol_type = other DNA
ttgcatgcctttcctttttgagaatttattcctgattacagtggacccttcaacaatgcgagggttagtagcgctgacca

SEQ ID NO: 55939 - DNA, 80 bp, synthetic construct; identical to SEQ ID NO: 14661
  source 1..80: mol_type = other DNA

SEQ ID NO: 55940 - DNA, 80 bp, synthetic construct
  source 1..80: mol_type = other DNA
catgataacactgcactctagcctgggcaacagagcaagaccttgtctcagaaaagcaaagaaaatgttatttaaaaaat

SEQ ID NO: 55941 - DNA, 80 bp, synthetic construct
  source 1..80: mol_type = other DNA
tataagtagacctgcacagttcaagcccatgttgttcaaaggtcaactgtactgtaagtttgttatataaaccagttaat

SEQ ID NO: 55942 - DNA, 80 bp, synthetic construct
  source 1..80: mol_type = other DNA
atccttccaactttttttttggtctgttgttaaaagcccccctatcccatgcctaagtaataagtaatctcaatattaca

SEQ ID NO: 55943 - DNA, 80 bp, synthetic construct; identical to SEQ ID NO: 14662
  source 1..80: mol_type = other DNA

SEQ ID NO: 55944 - DNA, 80 bp, synthetic construct
  source 1..80: mol_type = other DNA
taacgtgatttgtgaattttctgtcaaatcaggaaagaatcactggcattgccctcttcccacacatgcataggataaaa

SEQ ID NO: 55945 - DNA, 80 bp, synthetic construct
  source 1..80: mol_type = other DNA
gataggaaaaaaacgaaaaagccaaataagatgaacctctattcaggccccaatgagaggctgcttgactctgatctttc

SEQ ID NO: 55946 - DNA, 80 bp, synthetic construct
  source 1..80: mol_type = other DNA
gaaatacatatctcctcccgatacacatgcacacacgcaaaaacatatttaactgaaacaacggtttcatgaaactatag

SEQ ID NO: 55947 - DNA, 80 bp, synthetic construct; identical to SEQ ID NO: 14663
  source 1..80: mol_type = other DNA

SEQ ID NO: 55948 - DNA, 80 bp, synthetic construct
  source 1..80: mol_type = other DNA
gataacttgaggtcaacagttcgagacaagcctggcaaacatggtgaaaccccgtctctactaaaaatacagaaattatc

SEQ ID NO: 55949 - DNA, 80 bp, synthetic construct
  source 1..80: mol_type = other DNA
aataataatccaatgtgtccctagtctggctttcagggtcttagatgaggttcggaagtggacttaggagccttaggagc

SEQ ID NO: 55950 - DNA, 80 bp, synthetic construct
  source 1..80: mol_type = other DNA
ctgtggggtctggaggaccagatatcccgaccaaaagccccccctcccattcctttcacacgcctgccgcagaggtgcac

SEQ ID NO: 55951 - DNA, 80 bp, synthetic construct; identical to SEQ ID NO: 14664
  source 1..80: mol_type = other DNA

SEQ ID NO: 55952 - DNA, 80 bp, synthetic construct
  source 1..80: mol_type = other DNA
ggagcgggaagcgcagtatcgggaccacggctctgggaccaggaaaaacgcagactctccagagtcaatgtctacttcag

SEQ ID NO: 55953 - DNA, 80 bp, synthetic construct
  source 1..80: mol_type = other DNA
taagcggcctctgcctacagcgttcctcccgcctccacggcgccgagccctgattgacgttcagccaggccaatcatagc

SEQ ID NO: 55954 - DNA, 80 bp, synthetic construct
  source 1..80: mol_type = other DNA
acttgaacagaggcagacactgcggctcaaaaccccaagggtaggtacctattgtgcggagtctcggaacgcctgcctgg

SEQ ID NO: 55955 - DNA, 80 bp, synthetic construct; identical to SEQ ID NO: 14665
  source 1..80: mol_type = other DNA

SEQ ID NO: 55956 - DNA, 80 bp, synthetic construct
  source 1..80: mol_type = other DNA
tttttttggatataacttgttccctttaacccgaggtggccttggtgtctggcagctgttttctctgccaggcaccaccc

SEQ ID NO: 55957 - DNA, 80 bp, synthetic construct
  source 1..80: mol_type = other DNA
aacctgcttggaaatcgagtatttcctctatgcccaggtggagattgatgtttgggtttcacatctcccaactctgttgg

SEQ ID NO: 55958 - DNA, 80 bp, synthetic construct
  source 1..80: mol_type = other DNA
attttggcctggagcactaaggagccatactacacccaatgccagaggtggaacagaaatgaggtttgaaatgggaacca

SEQ ID NO: 55959 - DNA, 80 bp, synthetic construct; identical to SEQ ID NO: 14666
  source 1..80: mol_type = other DNA

SEQ ID NO: 55960 - DNA, 80 bp, synthetic construct
  source 1..80: mol_type = other DNA
ggagacctaaatccagaacttaaatttatgaacaccaggtctgtaggcactagacctcagaagtaggtgagtaggtggct

SEQ ID NO: 55961 - DNA, 80 bp, synthetic construct
  source 1..80: mol_type = other DNA
gggaatccagcacaaagaggatcataagtcatctccccacttctctatagtcatcatagacgtaattgctaacctaccct

SEQ ID NO: 55962 - DNA, 80 bp, synthetic construct
  source 1..80: mol_type = other DNA
atgaggtacacaacattctggcagtatcacactagggccagagttggtagctcacagatgtacgatagaggatggaagga

SEQ ID NO: 55963 - DNA, 80 bp, synthetic construct; identical to SEQ ID NO: 14667
  source 1..80: mol_type = other DNA

SEQ ID NO: 55964 - DNA, 80 bp, synthetic construct
  source 1..80: mol_type = other DNA
tccctgtgtgtagaacacatgaatctattggaatatcacacacagtgagcagactcttcttacacttactaaactctctt

SEQ ID NO: 55965 - DNA, 80 bp, synthetic construct
  source 1..80: mol_type = other DNA
caaaggaatatctaacccaagtgtacataaggagtaaatttggagtcagaggaagttggtcattgtaggaaagtaactgc

SEQ ID NO: 55966 - DNA, 80 bp, synthetic construct
  source 1..80: mol_type = other DNA
ccctggcgtcacacagatcattttctcttctcaagtcattgtattttcactggtagtaaaagaggataatatcttcatct

SEQ ID NO: 55967 - DNA, 80 bp, synthetic construct; identical to SEQ ID NO: 14668
  source 1..80: mol_type = other DNA

SEQ ID NO: 55968 - DNA, 80 bp, synthetic construct
  source 1..80: mol_type = other DNA
tctctcctacaaggattgtgaaatgtcatatgcctcctcccatagacttagatagacctaaaattgtcaacatgtgtcca

SEQ ID NO: 55969 - DNA, 80 bp, synthetic construct
  source 1..80: mol_type = other DNA
ggttggaaattttacattgctcttttttcccactttgaattcatatttttattctaccccccatgtagaatttttctttt

SEQ ID NO: 55970 - DNA, 80 bp, synthetic construct
  source 1..80: mol_type = other DNA
tatatgggctgggtgcagtggcccacacctgtactcccagcactttgtgaggctgaagcaggaggattacttgagcccag

SEQ ID NO: 55971 - DNA, 80 bp, synthetic construct; identical to SEQ ID NO: 14669
  source 1..80: mol_type = other DNA

SEQ ID NO: 55972 - DNA, 80 bp, synthetic construct
  source 1..80: mol_type = other DNA
tgaagttcacttatgtttcttatatacattatgcacatagcctgaaggtaattttataccatatttaaaataattttata

SEQ ID NO: 55973 - DNA, 80 bp, synthetic construct
  source 1..80: mol_type = other DNA
taactagaaatgcatctcttaatgagatggatagggactttattttcccaatttcatgttgacaaatgttacttattgtt

SEQ ID NO: 55974 - DNA, 80 bp, synthetic construct
  source 1..80: mol_type = other DNA
gctattattaaataatatttttaataatctgtcagctgacaactcaagtataaggttcttcttcaattttgttgaaagca

SEQ ID NO: 55975 - DNA, 80 bp, synthetic construct; identical to SEQ ID NO: 14670
  source 1..80: mol_type = other DNA

SEQ ID NO: 55976 - DNA, 80 bp, synthetic construct
  source 1..80: mol_type = other DNA
tgtgtcagcctccaagcgggagaaattaatccaaaataaatgaagctggatttctaaagtttagagcatcacatccaaga

SEQ ID NO: 55977 - DNA, 80 bp, synthetic construct
  source 1..80: mol_type = other DNA
tatgtgcattaattacagcagaatccacaaaacatttccatcaaattaaatcttactctaggaggtatatgataaaaata

SEQ ID NO: 55978 - DNA, 80 bp, synthetic construct
  source 1..80: mol_type = other DNA
gtttgttttactccaagatgtgatgttgatctgtgagaaattaattttgagcgttttgcctccactgccttgaaataatg

SEQ ID NO: 55979 - DNA, 80 bp, synthetic construct; identical to SEQ ID NO: 14671
  source 1..80: mol_type = other DNA

SEQ ID NO: 55980 - DNA, 80 bp, synthetic construct
  source 1..80: mol_type = other DNA
agctctgagacaaaaattgggaacctcagcatgagtttgtcacctgaatgaaataaaaaaaatcacgttgaaggctggtg

SEQ ID NO: 55981 - DNA, 80 bp, synthetic construct
  source 1..80: mol_type = other DNA
gcaaaggagccatttgttctttacgatggtcaggaaaggaagcatcaaggtcatcaaatgaaaaattttcagcatttcag

SEQ ID NO: 55982 - DNA, 80 bp, synthetic construct
  source 1..80: mol_type = other DNA
ggcattgtaggatgctcatgagctacctcagtctctaccacccactagatgccagtagcattgacccctgatctctctac

SEQ ID NO: 55983 - DNA, 80 bp, synthetic construct; identical to SEQ ID NO: 14672
  source 1..80: mol_type = other DNA

SEQ ID NO: 55984 - DNA, 80 bp, synthetic construct
  source 1..80: mol_type = other DNA
actaatagtggaaactggagggaagagggcttgaggggacatacgggaactctctgtaattcctgttcagtttttctgta

SEQ ID NO: 55985 - DNA, 80 bp, synthetic construct
  source 1..80: mol_type = other DNA
ccagatcaagaatattaaagaaacttagattaatattgttaccttgaatttattttactgagtaatcctctaagactcct

SEQ ID NO: 55986 - DNA, 80 bp, synthetic construct
  source 1..80: mol_type = other DNA
cttcttaagcatttgctgttaacagttattttcacatgtgcttgtacttattttacacttgtcagaacatagtatttacc

SEQ ID NO: 55987 - DNA, 80 bp, synthetic construct; identical to SEQ ID NO: 14673
  source 1..80: mol_type = other DNA

SEQ ID NO: 55988 - DNA, 80 bp, synthetic construct
  source 1..80: mol_type = other DNA
ttcgtagtttctaacatcctccaaatgaggagcccatccctaatttagatgcttctttcaaaggaggctcctttccttcg

SEQ ID NO: 55989 - DNA, 80 bp, synthetic construct
  source 1..80: mol_type = other DNA
gcttctacatttgtgctgcttctacaccaaaacagctggaatgtatatagtatggttctggatgctcttgtatacctcac

SEQ ID NO: 55990 - DNA, 80 bp, synthetic construct
  source 1..80: mol_type = other DNA
gggtgggattggtgatgttataaaagggtaagttcagccccttcttgctctctctgtcacccttccaccttcctctgtgt

SEQ ID NO: 55991 - DNA, 80 bp, synthetic construct; identical to SEQ ID NO: 14674
  source 1..80: mol_type = other DNA

SEQ ID NO: 55992 - DNA, 80 bp, synthetic construct
  source 1..80: mol_type = other DNA
gatgtgctgtaataaaagttatgtgactgacgcctctttttcttcctctttctttcaaaatatcttaatattttcaagcc

SEQ ID NO: 55993 - DNA, 80 bp, synthetic construct
  source 1..80: mol_type = other DNA
agggttccctaagctttgcaaacaacaaatagcatccacctatccatcctcagagagcaacagttttactgttatttaga

SEQ ID NO: 55994 - DNA, 80 bp, synthetic construct
  source 1..80: mol_type = other DNA
taaactgaggctaattggagatcataaaattttacagcttgctagaggtggaccacaattttgattggaaactttccacc

SEQ ID NO: 55995 - DNA, 80 bp, synthetic construct; identical to SEQ ID NO: 14675
  source 1..80: mol_type = other DNA

SEQ ID NO: 55996 - DNA, 80 bp, synthetic construct
  source 1..80: mol_type = other DNA
tcctggaaaaagacatctgaatagaattttagtagatatagctaggaattcccaagcaggtagaagaagggggacattcc

SEQ ID NO: 55997 - DNA, 80 bp, synthetic construct
  source 1..80: mol_type = other DNA
agttcgagaccagcctgggcaacatggcaaaacactgtctctacaaaaacaaaaaaaattatccctgttcagtggtgtgc

SEQ ID NO: 55998 - DNA, 80 bp, synthetic construct
  source 1..80: mol_type = other DNA
ctagacaatacagtgaaatgggggaagctagagaagagaggtgggcagtggcctcttatgctacgtaagagatttgacat

SEQ ID NO: 55999 - DNA, 80 bp, synthetic construct; identical to SEQ ID NO: 14676
  source 1..80: mol_type = other DNA

SEQ ID NO: 56000 - DNA, 80 bp, synthetic construct
  source 1..80: mol_type = other DNA
caggagtactgtctgagcccaggagttcaagaccagcctgggcaacatggcaagaccccatctctacaaaatttttttaa

SEQ ID NO: 56001 - DNA, 80 bp, synthetic construct
  source 1..80: mol_type = other DNA
atattatattcattaatgttgctgctgatatcagaaaaaattctaagtatcccacagtagcagatacaagcttttcaaaa

SEQ ID NO: 56002 - DNA, 80 bp, synthetic construct
  source 1..80: mol_type = other DNA
aaaagatggtgtttccatgaaagaaaagaaaaagtggctaattcagcttgcaactcaaacaagtgtttttccaaaagaca

SEQ ID NO: 56003 - DNA, 80 bp, synthetic construct; identical to SEQ ID NO: 14677
  source 1..80: mol_type = other DNA

SEQ ID NO: 56004 - DNA, 80 bp, synthetic construct
  source 1..80: mol_type = other DNA
ttcagaacccctgttgcccagaattcacataaaagaagatcatcaatggtcaattgatgctgatacctgatgaatgaaag

SEQ ID NO: 56005 - DNA, 80 bp, synthetic construct
  source 1..80: mol_type = other DNA
ttgcatcattggaaaatgccagcactatgcattcttgtggtgatttttcatccagcaggtattcagcaatgtcaactgtt

SEQ ID NO: 56006 - DNA, 80 bp, synthetic construct
  source 1..80: mol_type = other DNA
ctgcaactttgttggaaccatataagtgtttgaaaatgttttactgcacaagacacaatatgataaattattaacatcta

SEQ ID NO: 56007 - DNA, 80 bp, synthetic construct
  source 1..80: mol_type = other DNA
atccttttcagcatctctagacataggcaatctagacaccagaaaatgtgttttctcttctccctttttaaagccaacca

SEQ ID NO: 56008 - DNA, 80 bp, synthetic construct; identical to SEQ ID NO: 14678
  source 1..80: mol_type = other DNA

SEQ ID NO: 56009 - DNA, 80 bp, synthetic construct
  source 1..80: mol_type = other DNA
atcttaattttatgaatatttttgaccttgttgaccctctaaaaggatccaagggatctctccctcccaacatccccagg

SEQ ID NO: 56010 - DNA, 80 bp, synthetic construct
  source 1..80: mol_type = other DNA
tttaaagctttgggggggaaatgtagaataactttattatctcaaggtagatagcctaacaataccacgtgctgaagcag

SEQ ID NO: 56011 - DNA, 80 bp, synthetic construct
  source 1..80: mol_type = other DNA
gacattctcaaatacaaaaacaaagaagtatgcataaggatgttcattgcaggtttgcttataattggtggaaagtcagg

SEQ ID NO: 56012 - DNA, 80 bp, synthetic construct; identical to SEQ ID NO: 14679
  source 1..80: mol_type = other DNA

SEQ ID NO: 56013 - DNA, 80 bp, synthetic construct
  source 1..80: mol_type = other DNA
aatggttctttggataaataacagttgactttgttcctctgcttggtattttaaaaaacctattagtttacaaatctctt

SEQ ID NO: 56014 - DNA, 80 bp, synthetic construct
  source 1..80: mol_type = other DNA
tacctctgaatccttccattttcttttcactgcccccagatataaccaccaatgtgaagtcagttttatcattgctatgc

SEQ ID NO: 56015 - DNA, 80 bp, synthetic construct
  source 1..80: mol_type = other DNA
catattaaaataactgctcctaaatagtgatgtggccttgggcaagctctttcaagtttctgtgagctccagcttttcct

SEQ ID NO: 56016 - DNA, 80 bp, synthetic construct; identical to SEQ ID NO: 14680
  source 1..80: mol_type = other DNA

SEQ ID NO: 56017 - DNA, 80 bp, synthetic construct
  source 1..80: mol_type = other DNA
tgtaattcaagcttttcaggaatacagtcaatccataaagcaatagggagaaacatttccaatatcaagaggcactgatg

SEQ ID NO: 56018 - DNA, 80 bp, synthetic construct
  source 1..80: mol_type = other DNA
tgtttacatttctatattttgtttctttttcctctacatatgcattttgtcctatgtctatgtctccttcttaataggct

SEQ ID NO: 56019 - DNA, 80 bp, synthetic construct
  source 1..80: mol_type = other DNA
cttagtgcttggttatatataggtaggcattgttttctaaaaacactggtttacaaaatggaatgtgcacactacaggga

SEQ ID NO: 56020 - DNA, 80 bp, synthetic construct; identical to SEQ ID NO: 14681
  source 1..80: mol_type = other DNA

SEQ ID NO: 56021 - DNA, 80 bp, synthetic construct
  source 1..80: mol_type = other DNA
tccactaataaatgattccattcttcagaccatcaaactaaggactacgctttgaacatgctttggaaacattttcatta

SEQ ID NO: 56022 - DNA, 80 bp, synthetic construct
  source 1..80: mol_type = other DNA
aaaaatacaaaaattagccaggcatagtggcaggcgcctgtagtcccagctactcgagaggctgaggcaggagaatcgct

SEQ ID NO: 56023 - DNA, 80 bp, synthetic construct
  source 1..80: mol_type = other DNA
aaataaactgcaatagtaaatttagaagtaatactgaaagagcaactgggaagtcttagatgaagttgtcaccagcttct

SEQ ID NO: 56024 - DNA, 80 bp, synthetic construct; identical to SEQ ID NO: 14682
  source 1..80: mol_type = other DNA

SEQ ID NO: 56025 - DNA, 80 bp, synthetic construct
  source 1..80: mol_type = other DNA
actccaaccattccttcttgccaactgtgatcagaagtatgaaaaaaacagcccatgttcttccttagaggaagaccata

SEQ ID NO: 56026 - DNA, 80 bp, synthetic construct
  source 1..80: mol_type = other DNA
atataccagctgagcatttcataatatttattcgataaacctttccttggtcctgagcctccttgcttcccgacctactc

SEQ ID NO: 56027 - DNA, 80 bp, synthetic construct
  source 1..80: mol_type = other DNA
gtggacactcacctcttctaagaccttttatcaatcattctctaaacacctctcaaacatgtccttcccttgtatttcct

SEQ ID NO: 56028 - DNA, 80 bp, synthetic construct
  source 1..80: mol_type = other DNA
gggttcaaaattggagaaatggattttgaagtcatctttttgcaggtacaagagaagccatattgagtcagtcagagaag

SEQ ID NO: 56029 - DNA, 80 bp, synthetic construct; identical to SEQ ID NO: 14683
  source 1..80: mol_type = other DNA

SEQ ID NO: 56030 - DNA, 80 bp, synthetic construct
  source 1..80: mol_type = other DNA
ttggatatggaaacatagcttgtcagcctgacagcattagacatcttcatcaggagtctttatgtattctagatgctgat

SEQ ID NO: 56031 - DNA, 80 bp, synthetic construct
  source 1..80: mol_type = other DNA
atcttataccaacccatgagtgaggattccaagaaaacaggcatattcggattcaagaaacacaccataacagagtccag

SEQ ID NO: 56032 - DNA, 80 bp, synthetic construct
  source 1..80: mol_type = other DNA
aaatacagctgacatttcacatttatccaaacagtacatttcaaagaaacagtaagtataaggtaaactggagttcatct

SEQ ID NO: 56033 - DNA, 80 bp, synthetic construct; identical to SEQ ID NO: 14684
  source 1..80: mol_type = other DNA

SEQ ID NO: 56034 - DNA, 80 bp, synthetic construct
  source 1..80: mol_type = other DNA
cagcaaagcaccctgaggatactaaacaccctcagtatttagctaggatggcctaaaagagctaatctgaaagaattcat

SEQ ID NO: 56035 - DNA, 80 bp, synthetic construct
  source 1..80: mol_type = other DNA
tctatggatactttcctgaaagtacccctgaaggcattcctcctggattctgtgaagtaaattagccctcaaggtgtacc

SEQ ID NO: 56036 - DNA, 80 bp, synthetic construct
  source 1..80: mol_type = other DNA
ggagcatagatgaatcagaatccctgcttgccaccccattggacaccttgaaaagagacccttggaatggctatgacaac

SEQ ID NO: 56037 - DNA, 80 bp, synthetic construct; identical to SEQ ID NO: 14685
  source 1..80: mol_type = other DNA

SEQ ID NO: 56038 - DNA, 80 bp, synthetic construct
  source 1..80: mol_type = other DNA
acaattgttgcctccccttcatacataaacaggctgcaacaggccaggctacttgtatcttcaaggtaaatcagtaggga

SEQ ID NO: 56039 - DNA, 80 bp, synthetic construct
  source 1..80: mol_type = other DNA
atccacagtgtttctgggctctctaccagggctggatctggagggacacagaccagtatttgactttatctcttccccat

SEQ ID NO: 56040 - DNA, 80 bp, synthetic construct
  source 1..80: mol_type = other DNA
ttgaaacaaaatggcaaatatacttaagataatagaagataccagcaacataaagcaaaaccagtaactcacaaaaacaa

SEQ ID NO: 56041 - DNA, 80 bp, synthetic construct; identical to SEQ ID NO: 14686
  source 1..80: mol_type = other DNA

SEQ ID NO: 56042 - DNA, 80 bp, synthetic construct
  source 1..80: mol_type = other DNA
ctatgctcgttatattgagacaaataaatatttttaaaacttagaaagaagagtttatcaactgggcacagtggctcacg

SEQ ID NO: 56043 - DNA, 80 bp, synthetic construct
  source 1..80: mol_type = other DNA
tcgggaggctgaggcaaacccgggaggtggaggttccagtgggtgacagagtgataccctatcagaaaaaaaaaaaaaaa

SEQ ID NO: 56044 - DNA, 80 bp, synthetic construct
  source 1..80: mol_type = other DNA
aactttatatgtatcaaaattgctattcaagtgagatggcataacaaatttattatcatgcaaagaatccaaaggctcat

SEQ ID NO: 56045 - DNA, 80 bp, synthetic construct; identical to SEQ ID NO: 14687
  source 1..80: mol_type = other DNA

SEQ ID NO: 56046 - DNA, 80 bp, synthetic construct
  source 1..80: mol_type = other DNA
aaaagggaagaaacattgtacaataaaaacagaatgtgaaatgagttgcaaaagtaaatctttacttcagcagttaccaa

SEQ ID NO: 56047 - DNA, 80 bp, synthetic construct
  source 1..80: mol_type = other DNA
tacccaggtattaagcctagtatacattagttatttttcctgatcctctccctcctcccacctccaccctccaataggcc

SEQ ID NO: 56048 - DNA, 80 bp, synthetic construct
  source 1..80: mol_type = other DNA
cttatttatatctgcatagtattccatggtgtatgtgtatcacgttttctttatccagtctatcattagtgggcatttag

SEQ ID NO: 56049 - DNA, 80 bp, synthetic construct; identical to SEQ ID NO: 14688
  source 1..80: mol_type = other DNA

SEQ ID NO: 56050 - DNA, 80 bp, synthetic construct
  source 1..80: mol_type = other DNA
atgtcctttgcccactttttaatggtttttttttcttgtaaatttatttaagatccttatagatgctggatattatacct

SEQ ID NO: 56051 - DNA, 80 bp, synthetic construct
  source 1..80: mol_type = other DNA
tctttgccagtatatcctgaatggtattgcctaggttgtcttccaggatttttataattttgagttttatatttaagtct

SEQ ID NO: 56052 - DNA, 80 bp, synthetic construct
  source 1..80: mol_type = other DNA
gtagttttatttctgtgttctttattctgttccattggtctatgtgtctgttcttgtaccagtgccatgttgttttggtt

SEQ ID NO: 56053 - DNA, 80 bp, synthetic construct
  source 1..80: mol_type = other DNA
ccaccactttgggaggccgaggcagggggaatcacttgaggccaggagtttgagaccagcctggccaacatggcgaaacc

SEQ ID NO: 56054 - DNA, 80 bp, synthetic construct; identical to SEQ ID NO: 14689
  source 1..80: mol_type = other DNA

SEQ ID NO: 56055 - DNA, 80 bp, synthetic construct
  source 1..80: mol_type = other DNA
tccccagttagctatattcctaggtattttattttttttgtgacaattgtgaacgggagttcattcctgatttggctctc

SEQ ID NO: 56056 - DNA, 80 bp, synthetic construct
  source 1..80: mol_type = other DNA
tttatctttctctcttcctatttggacgtctttatttgtttcttttgcccaattgccccagccaggacttccaacgctat

SEQ ID NO: 56057 - DNA, 80 bp, synthetic construct; identical to SEQ ID NO: 14690
  source 1..80: mol_type = other DNA

SEQ ID NO: 56058 - DNA, 80 bp, synthetic construct
  source 1..80: mol_type = other DNA
ctcctgggttcaagtgattcgcctgtctcagcctcccgagtagctgggattacaggtgtgccaccatgcccagctaattt

SEQ ID NO: 56059 - DNA, 80 bp, synthetic construct
  source 1..80: mol_type = other DNA
tatttatttatttatttttgagacagagtttcactcttgttgcccaggctggagtgcaatggtgcgatcccggtacactg

SEQ ID NO: 56060 - DNA, 80 bp, synthetic construct
  source 1..80: mol_type = other DNA
atccacctgcctcagcctcccaaagtgctaagattacaagcgtgagccacgacgtccagcctgcactttatttttaacct

SEQ ID NO: 56061 - DNA, 80 bp, synthetic construct
  source 1..80: mol_type = other DNA
tggtggcacgcacctgtaatcccagctactcgggaggctgaggcagaagaatcgcttgaacctgggagatggaggttgca

SEQ ID NO: 56062 - DNA, 80 bp, synthetic construct; identical to SEQ ID NO: 14691
  source 1..80: mol_type = other DNA

SEQ ID NO: 56063 - DNA, 80 bp, synthetic construct
  source 1..80: mol_type = other DNA
ctctctcacattaaaaatgaccaaagagacatgaaaacttactgaaatgcttgattctggattgcaggacaagagactgg

SEQ ID NO: 56064 - DNA, 80 bp, synthetic construct
  source 1..80: mol_type = other DNA
atgtaagagaacagccttgttcttaggaaatacattgaaatatttagcaggaaaggggcatgtgtgtatgtaactccaga

SEQ ID NO: 56065 - DNA, 80 bp, synthetic construct
  source 1..80: mol_type = other DNA
aatgttgcaaatcattgaatttggacaagtgtacgtaagaattctttgtactactcttctaaaattacttcaaaataaaa

SEQ ID NO: 56066 - DNA, 80 bp, synthetic construct; identical to SEQ ID NO: 14692
  source 1..80: mol_type = other DNA

SEQ ID NO: 56067 - DNA, 80 bp, synthetic construct
  source 1..80: mol_type = other DNA
tttattacaaaaacaaacaaggaaatacaagaaaggcaagttttacgtccatgctttataaaagtaaatacaacaaccca

SEQ ID NO: 56068 - DNA, 80 bp, synthetic construct
  source 1..80: mol_type = other DNA
aattctgataaactattttttaaatgtaaaaaaccatttatgtttaaaaaataaacttttagaaaaccaggaataaaagg

SEQ ID NO: 56069 - DNA, 80 bp, synthetic construct
  source 1..80: mol_type = other DNA
agaacagctagaatctcaggatctgaggaatgacatactagtgagttccctgggctttctttttgccacatatatgctgg

SEQ ID NO: 56070 - DNA, 80 bp, synthetic construct; identical to SEQ ID NO: 14693
  source 1..80: mol_type = other DNA

SEQ ID NO: 56071 - DNA, 80 bp, synthetic construct
  source 1..80: mol_type = other DNA
taagatgtcaatggagatgggggcggggggagaacacctgcccagaaataatgaaaatggctaaaagaagttatctaaac

SEQ ID NO: 56072 - DNA, 80 bp, synthetic construct
  source 1..80: mol_type = other DNA
aaatgtatgtagaggaaacatttaagacaatcgtattttcagtgaggaggataaagggatgggacataaattaggaaggt

SEQ ID NO: 56073 - DNA, 80 bp, synthetic construct
  source 1..80: mol_type = other DNA
actgtagataaataaaactggcgttctaaaaaatgcccaagtaagccacagaaagtcagaaaagagtaaacagagatgaa

SEQ ID NO: 56074 - DNA, 80 bp, synthetic construct; identical to SEQ ID NO: 14694
  source 1..80: mol_type = other DNA

SEQ ID NO: 56075 - DNA, 80 bp, synthetic construct
  source 1..80: mol_type = other DNA
gccacctagttttattttgttatggcaccccaagctaatacatatatcaataattacattattcctaatacaaagaaatg

SEQ ID NO: 56076 - DNA, 80 bp, synthetic construct
  source 1..80: mol_type = other DNA
aatgatctaaatacctcaattaagaaacccagttcaggccaggcatggtggcttacacctgtaaacccagcactctacaa

SEQ ID NO: 56077 - DNA, 80 bp, synthetic construct
  source 1..80: mol_type = other DNA
gtgaaaccccgtctctactaaaatacaaaaattagccaggcatggtggtgtgcacctgtggtcccagctactcaggaggc

SEQ ID NO: 56078 - DNA, 80 bp, synthetic construct; identical to SEQ ID NO: 14695
  source 1..80: mol_type = other DNA

SEQ ID NO: 56079 - DNA, 80 bp, synthetic construct
  source 1..80: mol_type = other DNA
gaactgaaagaaaaaatagaaaatccacaattataattggagacatcaacacaactctcacaactattaataaaactaga

SEQ ID NO: 56080 - DNA, 80 bp, synthetic construct
  source 1..80: mol_type = other DNA
cctgtagtcccagatactcgggaggctgaggcaggagaatggcgtgaacctggggacggagctttcagtgagctgagatc

SEQ ID NO: 56081 - DNA, 80 bp, synthetic construct
  source 1..80: mol_type = other DNA
acccatcaatagcagaatacacattggctcttttttgttgtttttcttttccggttttactaggtgcaaggggtacatat

SEQ ID NO: 56082 - DNA, 80 bp, synthetic construct; identical to SEQ ID NO: 14696
  source 1..80: mol_type = other DNA

SEQ ID NO: 56083 - DNA, 80 bp, synthetic construct
  source 1..80: mol_type = other DNA
tgctgcaaaggccatgatcccattttttatagctgtgtagtatttcatggtgtatatgtaccacatcttctttatccagt

SEQ ID NO: 56084 - DNA, 80 bp, synthetic construct
  source 1..80: mol_type = other DNA
ggaattttgctttaagttctttgagaaatctccagactgctttccacagtgcctgaactaatttacattacccccaatag

SEQ ID NO: 56085 - DNA, 80 bp, synthetic construct
  source 1..80: mol_type = other DNA
tggccgcacagaatatacattcttttgaagtgtccatgcaacatataccaagttggactatatccagggccataaaacaa

SEQ ID NO: 56086 - DNA, 80 bp, synthetic construct; identical to SEQ ID NO: 14697
  source 1..80: mol_type = other DNA

SEQ ID NO: 56087 - DNA, 80 bp, synthetic construct
  source 1..80: mol_type = other DNA
ggcttatgaaaggtgctcaacattatgaatcatcagagaaatgcaaatcagaagttcaatgagatattatctcacttcag

SEQ ID NO: 56088 - DNA, 80 bp, synthetic construct
  source 1..80: mol_type = other DNA
gcatggtgggccatgcctgtagtcccaactacttgggaggctgaggcagaagaatcgcttgaacctgggagatggaggtt

SEQ ID NO: 56089 - DNA, 80 bp, synthetic construct
  source 1..80: mol_type = other DNA
aaccaccatggagaacagcttggaagttcctccaaaaaaattaaaattgagctaccatatgatccagcaatcccactgct

SEQ ID NO: 56090 - DNA, 80 bp, synthetic construct; identical to SEQ ID NO: 14698
  source 1..80: mol_type = other DNA

SEQ ID NO: 56091 - DNA, 80 bp, synthetic construct
  source 1..80: mol_type = other DNA
gggtacaaaaaaagtagaaagaatgaatatgacctactatttgatagcacaatagagtgactatagtcaaaaataactta

SEQ ID NO: 56092 - DNA, 80 bp, synthetic construct
  source 1..80: mol_type = other DNA
ccatgaacccacgaaatattttcaaaataataaaaaaaattataggacacagctaaaccagtgctgaaagggaaatttat

SEQ ID NO: 56093 - DNA, 80 bp, synthetic construct
  source 1..80: mol_type = other DNA
aaactctcatctcaagagcccagaaaaagaagatcaaaatacatccaaagaagaaaggaaggccgagcactgtggctcac

SEQ ID NO: 56094 - DNA, 80 bp, synthetic construct
  source 1..80: mol_type = other DNA
ggttgaggcaggagaatcacttgagcccaggaggcggaggttgtagtgaggtgagattgcaccactgcactccagcctgg

SEQ ID NO: 56095 - DNA, 80 bp, synthetic construct; identical to SEQ ID NO: 14699
  source 1..80: mol_type = other DNA

SEQ ID NO: 56096 - DNA, 80 bp, synthetic construct
  source 1..80: mol_type = other DNA
atgaaaaaatggatatattagacctgattaaaactaaaaactgttgctctgtgaaagacttgtaaaggaatgaaaaggca

SEQ ID NO: 56097 - DNA, 80 bp, synthetic construct
  source 1..80: mol_type = other DNA
gagtttgagaccagcctagccaacatggtgaaactctgtctctactaaaaatactaaaaattagctgggcgttgtggcac

SEQ ID NO: 56098 - DNA, 80 bp, synthetic construct
  source 1..80: mol_type = other DNA
catttcattaaaaggatatacagatggcaaataagcacatgaaaagatgttcgatatcattagccattaaggaaacgcaa

SEQ ID NO: 56099 - DNA, 80 bp, synthetic construct
  source 1..80: mol_type = other DNA
aggcggatcatgaggacaggagattgagaccatcctggctaacatggtgaaaccccatctctactaaaaatacaaaaaat

SEQ ID NO: 56100 - DNA, 80 bp, synthetic construct; identical to SEQ ID NO: 14700
  source 1..80: mol_type = other DNA

SEQ ID NO: 56101 - DNA, 80 bp, synthetic construct
  source 1..80: mol_type = other DNA
atatcagccaaatctggaaacaacccagatgtgatggacagatggctaaactaactgtgctatacccataccatataata

SEQ ID NO: 56102 - DNA, 80 bp, synthetic construct
  source 1..80: mol_type = other DNA
gtgacaaagtcatagaaatggataagagattagtgattgctagacattaaggagggtatgggatggtagggaagtgggtg

SEQ ID NO: 56103 - DNA, 80 bp, synthetic construct
  source 1..80: mol_type = other DNA
tgtctagaaaagggcaaggtgaagaatccttgtgatcatagaagtgttctgtattgtggctgtatccatgtatcctaatt

SEQ ID NO: 56104 - DNA, 80 bp, synthetic construct
  source 1..80: mol_type = other DNA
gtaatgctcattatcaccctactgtttgacacagcattgaagatcctagtcaacaacatgaaaaataaaacactaaggat

SEQ ID NO: 56105 - DNA, 80 bp, synthetic construct; identical to SEQ ID NO: 14701
  source 1..80: mol_type = other DNA

SEQ ID NO: 56106 - DNA, 80 bp, synthetic construct
  source 1..80: mol_type = other DNA
gtgcaaattaaaaccataacatcatctaattctcattagcatggctactataaaaatgaaaggaaaaaggaaagaaggga

SEQ ID NO: 56107 - DNA, 80 bp, synthetic construct
  source 1..80: mol_type = other DNA
aacagtacggcagttcctcaaaaaatcagtagtaaaactactatatgacccaagagtccacttctgggtataaatgcaaa

SEQ ID NO: 56108 - DNA, 80 bp, synthetic construct
  source 1..80: mol_type = other DNA
aggaagaaagcactcttacatgctgcaacaagtatgaattttaaggacattaagctaagtgaaataagccaatcgccaaa

SEQ ID NO: 56109 - DNA, 80 bp, synthetic construct; identical to SEQ ID NO: 14702
  source 1..80: mol_type = other DNA

SEQ ID NO: 56110 - DNA, 80 bp, synthetic construct
  source 1..80: mol_type = other DNA
ataagataccaatcacaatagcagcaaaagctacaacatgcctaagaattaactgagcatactcaggactactatgaaaa

SEQ ID NO: 56111 - DNA, 80 bp, synthetic construct
  source 1..80: mol_type = other DNA
acagaactagaagtgagtgtcctcccaaactccccagtaggaaactacaaacttagtttctgttgctactatgcgcttgt

SEQ ID NO: 56112 - DNA, 80 bp, synthetic construct
  source 1..80: mol_type = other DNA
cctgcatgacattgaatggctcccatgctccctggcttcttcttgcttccagcatcagcctaagagcagagggaagaggg

SEQ ID NO: 56113 - DNA, 80 bp, synthetic construct; identical to SEQ ID NO: 14703
  source 1..80: mol_type = other DNA

SEQ ID NO: 56114 - DNA, 80 bp, synthetic construct
  source 1..80: mol_type = other DNA
aagaggaagggtctggagaaacaaggagccccccatctgggagtagtctctataggtttggggcctctccactctctgaa

SEQ ID NO: 56115 - DNA, 80 bp, synthetic construct
  source 1..80: mol_type = other DNA
aaaggatttgaggatggggttgaactccaccctcgtttttcatctgatttgcccaattttactttggaaagagaaaaact

SEQ ID NO: 56116 - DNA, 80 bp, synthetic construct
  source 1..80: mol_type = other DNA
gaacatgctctccctcagggaaaaaaaaaatgccaaggataccacctcccgtggtgtatttgagatttattctcattgtc

SEQ ID NO: 56117 - DNA, 80 bp, synthetic construct
  source 1..80: mol_type = other DNA
agttctttcatgggaggggaggtggactagatgacctttaaaaccaattctagctccaagttcagcttttaaaacaacaa

SEQ ID NO: 56118 - DNA, 80 bp, synthetic construct; identical to SEQ ID NO: 14704
  source 1..80: mol_type = other DNA

SEQ ID NO: 56119 - DNA, 80 bp, synthetic construct
  source 1..80: mol_type = other DNA
caagtaccactcattcccctgtgtaagaactcccctttctacctatagtattctgattttctggatcctaggagacctac

SEQ ID NO: 56120 - DNA, 80 bp, synthetic construct
  source 1..80: mol_type = other DNA
tgccactttgattcccactgctgtgactagaactagacccttcagatctgcagcttctcctttaaaactgtccagatagg

SEQ ID NO: 56121 - DNA, 80 bp, synthetic construct
  source 1..80: mol_type = other DNA
gaaaatacaaaattagccaggcatggtggtgcacgcctgtaatctcagctacttgggaggctgaggcaggagaatcgctt

SEQ ID NO: 56122 - DNA, 80 bp, synthetic construct; identical to SEQ ID NO: 14705
  source 1..80: mol_type = other DNA

SEQ ID NO: 56123 - DNA, 80 bp, synthetic construct
  source 1..80: mol_type = other DNA
ggtgttccaaatcaactcatttcttggtttctttttcttacccatattctagtatctagctctaattccaaaaacaattc

SEQ ID NO: 56124 - DNA, 80 bp, synthetic construct
  source 1..80: mol_type = other DNA
ctcaccagcatgagggtcttcagaataaagtaatctgctacttccagctcaggtagacaaacatcctacagaaatctgtt

SEQ ID NO: 56125 - DNA, 80 bp, synthetic construct
  source 1..80: mol_type = other DNA
aaggtctgagaccagtgcctaagacataataatcactcaagctatgttcccttctgcattcagggtatggaagaaataac

SEQ ID NO: 56126 - DNA, 80 bp, synthetic construct
  source 1..80: mol_type = other DNA
ataatcgaatatagctaacgtcactattgcaggctggctatgtgcctggcggtgttcttagccatttacaagtatgaact

SEQ ID NO: 56127 - DNA, 80 bp, synthetic construct; identical to SEQ ID NO: 14706
  source 1..80: mol_type = other DNA

SEQ ID NO: 56128 - DNA, 80 bp, synthetic construct
  source 1..80: mol_type = other DNA
cagattatattcatcccagaaatatagccttggacaataatttggttacagcatagtcccaggaatgaggtcccccaagt

SEQ ID NO: 56129 - DNA, 80 bp, synthetic construct
  source 1..80: mol_type = other DNA
cctctaggaaatgtgccatcctacagaataaataaaagggagataatgaggcttcaacccaacttgcccccatcgtttgt

SEQ ID NO: 56130 - DNA, 80 bp, synthetic construct
  source 1..80: mol_type = other DNA
aatcatgcccttgcctagatcctcatggaagctcacccatataataatcaagattagttgaacccaacactgacccctct

SEQ ID NO: 56131 - DNA, 80 bp, synthetic construct; identical to SEQ ID NO: 14707
  source 1..80: mol_type = other DNA

SEQ ID NO: 56132 - DNA, 80 bp, synthetic construct
  source 1..80: mol_type = other DNA
aggtgctgcaaaaaatagaaacttacttgacccagtttctgttgctcacccccagggcaattccatttattgcagccacc

SEQ ID NO: 56133 - DNA, 80 bp, synthetic construct
  source 1..80: mol_type = other DNA
ttccaggtcctctctaatacagtggggcctctcaaggcatcctctttccttcctttaccccaaagccacccttatcagga

SEQ ID NO: 56134 - DNA, 80 bp, synthetic construct
  source 1..80: mol_type = other DNA
tccatcctgtgagttatcctactacttgtgtacctcctacatctagatctcccatgtgtcctttcagagcttgtctccat

SEQ ID NO: 56135 - DNA, 80 bp, synthetic construct; identical to SEQ ID NO: 14708
  source 1..80: mol_type = other DNA

SEQ ID NO: 56136 - DNA, 80 bp, synthetic construct
  source 1..80: mol_type = other DNA
tttaactactcccgacactgagttcaaacagtgtttgaactgtaagtaattctttatccactggcccctgagcatgcatg

SEQ ID NO: 56137 - DNA, 80 bp, synthetic construct
  source 1..80: mol_type = other DNA
ggctagaatagtgtattacaatttggggttctgaaaatatgattgccaaatttacagcctcatttcaaagcaagcacgct

SEQ ID NO: 56138 - DNA, 80 bp, synthetic construct
  source 1..80: mol_type = other DNA
catttctttatcccatttccccattctggtcctaagccccccgtaagttcctccagactcagtccccattttcagcactt

SEQ ID NO: 56139 - DNA, 80 bp, synthetic construct; identical to SEQ ID NO: 14709
  source 1..80: mol_type = other DNA

SEQ ID NO: 56140 - DNA, 80 bp, synthetic construct
  source 1..80: mol_type = other DNA
tccctcgtgttaaaaggagtggttttggctacttgcacagatggtggccctgcataggagaaaaaaacatgtttaggaag

SEQ ID NO: 56141 - DNA, 80 bp, synthetic construct
  source 1..80: mol_type = other DNA
tccttcattgcccctttctttctttcctcctccagaattatgtttgattacaattagtaaaagccagatctgaactgcaa

SEQ ID NO: 56142 - DNA, 80 bp, synthetic construct
  source 1..80: mol_type = other DNA
ctttttctcctcacatagttcaaggaaacaagcctaacttaggactcactcttaaatttggaatgaatgtagtcaaacta

SEQ ID NO: 56143 - DNA, 80 bp, synthetic construct; identical to SEQ ID NO: 14710
  source 1..80: mol_type = other DNA

SEQ ID NO: 56144 - DNA, 80 bp, synthetic construct
  source 1..80: mol_type = other DNA
tgggattccaaatattcccatgcctgggcccacatcagatctggaacatcaaaatctgggataacaaggcaagaacatct

SEQ ID NO: 56145 - DNA, 80 bp, synthetic construct
  source 1..80: mol_type = other DNA
ttgaggttcaatcctccgtctttctacatttcagatccacacattttctcttatttgctgctcaaatctcaaacccctgg

SEQ ID NO: 56146 - DNA, 80 bp, synthetic construct
  source 1..80: mol_type = other DNA
tgtctttttggttgaggtgctgtgagaggacattcgccaagctattcagcaccccaaattcgcaaggggccatcttattc

SEQ ID NO: 56147 - DNA, 80 bp, synthetic construct; identical to SEQ ID NO: 14711
  source 1..80: mol_type = other DNA

SEQ ID NO: 56148 - DNA, 80 bp, synthetic construct
  source 1..80: mol_type = other DNA
cctgcaggaggggctggtcaccagaaagaccaagtcatgattagaagtctggaacttttagtcccatcccccatactccc

SEQ ID NO: 56149 - DNA, 80 bp, synthetic construct
  source 1..80: mol_type = other DNA
cctgtgattgggacccttccagatctggtatctcttcatctggatgttcctttgtatgctttaaaatatcctttgttaaa

SEQ ID NO: 56150 - DNA, 80 bp, synthetic construct
  source 1..80: mol_type = other DNA
acatgtactaaaacatcattatccaccccatgaatatttataattattattatcaattaaaatatcctttgtaaaaaatc

SEQ ID NO: 56151 - DNA, 80 bp, synthetic construct; identical to SEQ ID NO: 14712
  source 1..80: mol_type = other DNA

SEQ ID NO: 56152 - DNA, 80 bp, synthetic construct
  source 1..80: mol_type = other DNA
ctggcacagatttcctgctcagggaacatctactgaccaagctcatacactgaagtttctgaaagtctgatttgagggag

SEQ ID NO: 56153 - DNA, 80 bp, synthetic construct
  source 1..80: mol_type = other DNA
ggtcaagagaaagagtcagccttgtattgtgctggaaatattaaatattcacttcgcacatatttatgaagcacttgctg

SEQ ID NO: 56154 - DNA, 80 bp, synthetic construct
  source 1..80: mol_type = other DNA
agggagacaaactatctggggtgtcaaatgcaattacaaaacggaacacccttaccctgaaacaggagcaggggaaggga

SEQ ID NO: 56155 - DNA, 80 bp, synthetic construct; identical to SEQ ID NO: 14713
  source 1..80: mol_type = other DNA

SEQ ID NO: 56156 - DNA, 80 bp, synthetic construct
  source 1..80: mol_type = other DNA
atcctgccttagtcttagacaacaggtctccttgtctctcttaattctttttctgcagaacaaccagtagatttccgtag

SEQ ID NO: 56157 - DNA, 80 bp, synthetic construct
  source 1..80: mol_type = other DNA
cttacagggaggttacccaagaagataattacaaaaacccttgtctgtcctgagatgagaggacccagagcccttctggg

SEQ ID NO: 56158 - DNA, 80 bp, synthetic construct
  source 1..80: mol_type = other DNA
ctgttctagccagtcaagcttcatttcctcctcagttataatagctgctttccggagctagtaaaccatatcctcctaca

SEQ ID NO: 56159 - DNA, 80 bp, synthetic construct; identical to SEQ ID NO: 14714
  source 1..80: mol_type = other DNA

SEQ ID NO: 56160 - DNA, 80 bp, synthetic construct
  source 1..80: mol_type = other DNA
atttggcgtaaaaatttatttcatcacccaggtaataagtatagtatctgataggtagtgttttgatcctctccctcctc

SEQ ID NO: 56161 - DNA, 80 bp, synthetic construct
  source 1..80: mol_type = other DNA
atgatgctgcaaaagacgtgatctcgtccttttttgtctgtggagtattccatggtgtatatgtaccacattttctttat

SEQ ID NO: 56162 - DNA, 80 bp, synthetic construct
  source 1..80: mol_type = other DNA
gttttaaggttcttgagaaattgccaaactgctttcctcaatggctgaactaatttatgttcccaccagcagtgtataag

SEQ ID NO: 56163 - DNA, 80 bp, synthetic construct; identical to SEQ ID NO: 14715
  source 1..80: mol_type = other DNA

SEQ ID NO: 56164 - DNA, 80 bp, synthetic construct
  source 1..80: mol_type = other DNA
cagggtttcatcatgttggccaggctgttcttgaactcctgacctcaagtgatccacccacctcagcctcctaaagtgct

SEQ ID NO: 56165 - DNA, 80 bp, synthetic construct
  source 1..80: mol_type = other DNA
tgcctcttcacatcttagtttctgagaactcttggattttattaaatagtgagctaaacaaaagaggattgtggaagggg

SEQ ID NO: 56166 - DNA, 80 bp, synthetic construct
  source 1..80: mol_type = other DNA
agctcccagccactgcccccactcaccttgcttatatactctaactctgctaacgaactgtcaagtgtgttggaatgggc

SEQ ID NO: 56167 - DNA, 80 bp, synthetic construct
  source 1..80: mol_type = other DNA
tcacctgaggtcaggagtttgagaccagcctggcaaacatggtgaaaccccgtctctacaaaaaatacaaaaattagctg

SEQ ID NO: 56168 - DNA, 80 bp, synthetic construct; identical to SEQ ID NO: 14716
  source 1..80: mol_type = other DNA

SEQ ID NO: 56169 - DNA, 80 bp, synthetic construct
  source 1..80: mol_type = other DNA
tagtgaggcctccgctgagaaagagagaaagagaagagtcacaatccataacccaattcacccaagtcttatctttcctg

SEQ ID NO: 56170 - DNA, 80 bp, synthetic construct
  source 1..80: mol_type = other DNA
tcctgcccaggtaagctgttagcctaaccttataggaaccaagtcctgggatccttttcaatgtctacaaagcctagccc

SEQ ID NO: 56171 - DNA, 80 bp, synthetic construct
  source 1..80: mol_type = other DNA
gagaggatttcacttctctattaattcaaacactgagggagctttttagaataaagaaggacagaaaacccagacacctg

SEQ ID NO: 56172 - DNA, 80 bp, synthetic construct
  source 1..80: mol_type = other DNA
ttatttgttaattattgatatagcaccgggaccgaagaggtatggagccccaaccaggttcccacatgttgcctttcttt

SEQ ID NO: 56173 - DNA, 80 bp, synthetic construct; identical to SEQ ID NO: 14717
  source 1..80: mol_type = other DNA

SEQ ID NO: 56174 - DNA, 80 bp, synthetic construct
  source 1..80: mol_type = other DNA
aaggcagttggcattgtaggtctggtgtatagctccacaagcttgacaatgctgtgaggtgccatcagggaggaggtgtc

SEQ ID NO: 56175 - DNA, 80 bp, synthetic construct
  source 1..80: mol_type = other DNA
ttcgcaggttcttggggcagacggttttaactgaagtctccattttataaacacaaaattgctcaaccagttaatcacgc

SEQ ID NO: 56176 - DNA, 80 bp, synthetic construct
  source 1..80: mol_type = other DNA
cctgtcaggattcactgctctagaccctgacctttggattatagtttctgtagtcagttcaccatccttccaacctacag

SEQ ID NO: 56177 - DNA, 80 bp, synthetic construct; identical to SEQ ID NO: 14718
  source 1..80: mol_type = other DNA

SEQ ID NO: 56178 - DNA, 80 bp, synthetic construct
  source 1..80: mol_type = other DNA
catgctaacataatgacaacctctccccacatctctaacctaaatgctaccccaattaaagtaacagtaggatttcagga

SEQ ID NO: 56179 - DNA, 80 bp, synthetic construct
  source 1..80: mol_type = other DNA
caaacaatatgatactgattagtaatgagagaaaagcaaattaaaacaacaaaataccactctacacccaccatgttgcc

SEQ ID NO: 56180 - DNA, 80 bp, synthetic construct
  source 1..80: mol_type = other DNA
tcccaatccttaggttgagtgctttaagtcttggaagatttcaataaagagaaattaggggcaggttcatggaataagtt

SEQ ID NO: 56181 - DNA, 80 bp, synthetic construct; identical to SEQ ID NO: 14719
  source 1..80: mol_type = other DNA

SEQ ID NO: 56182 - DNA, 80 bp, synthetic construct
  source 1..80: mol_type = other DNA
tctagataagttggaaaacagagagacagagaaattaggaagaactagaaagcaccacatctagaattactaacatgaga

SEQ ID NO: 56183 - DNA, 80 bp, synthetic construct
  source 1..80: mol_type = other DNA
gccaaacactattttaagcattctgtaggtattaacttatttaagcttcacagcatgaggatatgctgccttatttccta

SEQ ID NO: 56184 - DNA, 80 bp, synthetic construct
  source 1..80: mol_type = other DNA
gtggtaagggggacaccattgttatcatcatccttttacagaaaatgacaccaaagcacaagttaagtaacttgcccaag

SEQ ID NO: 56185 - DNA, 80 bp, synthetic construct; identical to SEQ ID NO: 14720
  source 1..80: mol_type = other DNA

SEQ ID NO: 56186 - DNA, 80 bp, synthetic construct
  source 1..80: mol_type = other DNA
catgtgaattctttgcccttccaggctgttttcacttcatgttaggggcttcatgatactgttttcccagaactgacata

SEQ ID NO: 56187 - DNA, 80 bp, synthetic construct
  source 1..80: mol_type = other DNA
acaaaacacacaagcagcttccttaaccattttgtaagcagattattagaaaataactctgccttcgtttctcacatatt

SEQ ID NO: 56188 - DNA, 80 bp, synthetic construct
  source 1..80: mol_type = other DNA
ttaaggcatgctgaatttgaaacgacaacccactcaagttgagatatccagaaacaaataccatgagttaagaaagaagc

SEQ ID NO: 56189 - DNA, 80 bp, synthetic construct; identical to SEQ ID NO: 14721
  source 1..80: mol_type = other DNA

SEQ ID NO: 56190 - DNA, 80 bp, synthetic construct
  source 1..80: mol_type = other DNA
aatcatctccaagcacccttcctacagcaccccatgattccttttttcactcaaagcaattcttgtgacccataactgtg

SEQ ID NO: 56191 - DNA, 80 bp, synthetic construct
  source 1..80: mol_type = other DNA
cccgccccctccagatgacataccacctgagcaaggcttccggaagtagatgatgagaacaatgcccacgatgatgccca

SEQ ID NO: 56192 - DNA, 80 bp, synthetic construct
  source 1..80: mol_type = other DNA
cacccagggaaatgacgtgggtgtctgggatgacatgggagactgggatgggcttagggtaggaatggactaaacaaggt

SEQ ID NO: 56193 - DNA, 80 bp, synthetic construct; identical to SEQ ID NO: 14722
  source 1..80: mol_type = other DNA

SEQ ID NO: 56194 - DNA, 80 bp, synthetic construct
  source 1..80: mol_type = other DNA
ccctggtggggggattgaagtgtagggggaaaaagagactagtttagatggtatctctgtgtttggaggggccatggcat

SEQ ID NO: 56195 - DNA, 80 bp, synthetic construct
  source 1..80: mol_type = other DNA
ttccttcagcacttcctgtctagagctcacattgatgtctaaccatgcactgtcttctcactaagacatagtcacgtcat

SEQ ID NO: 56196 - DNA, 80 bp, synthetic construct
  source 1..80: mol_type = other DNA
tgttgaattcatcacattcaatacatagttctgaatgcctactacatgctaggtacttcggcccaccaaaagaacacagg

SEQ ID NO: 56197 - DNA, 80 bp, synthetic construct; identical to SEQ ID NO: 14723
  source 1..80: mol_type = other DNA

SEQ ID NO: 56198 - DNA, 80 bp, synthetic construct
  source 1..80: mol_type = other DNA
ggttttgcaggtcatctggccacattggagtaggagctgcaaaggacacagggtgaggttcagggaggtgggagccttct

SEQ ID NO: 56199 - DNA, 80 bp, synthetic construct
  source 1..80: mol_type = other DNA
tagctgggcatgttggcatgcgcctgtagctactcgggaggctgagggaggagaattgcttgaaccagggaggcagaggt

SEQ ID NO: 56200 - DNA, 80 bp, synthetic construct
  source 1..80: mol_type = other DNA
gggtgaagaacaaattatggcatctctccaagcttcccctgcctataaaaaggccagttggcaaaagtaaagagttctac

SEQ ID NO: 56201 - DNA, 80 bp, synthetic construct; identical to SEQ ID NO: 14724
  source 1..80: mol_type = other DNA

SEQ ID NO: 56202 - DNA, 80 bp, synthetic construct
  source 1..80: mol_type = other DNA
agaccagcctggcaaacatgatgaaaccccatctctactaaaaatacaaaaatcagctgggtgtggtggcatgcgcctgt

SEQ ID NO: 56203 - DNA, 80 bp, synthetic construct
  source 1..80: mol_type = other DNA
tatatatataaaataaagtgacagattcagagtcactgttcattgtgtgtttgggggctgcacaaagacacctagccaaa

SEQ ID NO: 56204 - DNA, 80 bp, synthetic construct
  source 1..80: mol_type = other DNA
tgtctaattcataccaggccactgtattgactagagaaggccatggatgggtttctcactcttagaagggaaagaggagg

SEQ ID NO: 56205 - DNA, 80 bp, synthetic construct
  source 1..80: mol_type = other DNA
ctctcaaaatgtcttctgttccttaacctaccaggcctcccaaagacagcaatgggagaagtgaccccataactgcataa

SEQ ID NO: 56206 - DNA, 80 bp, synthetic construct; identical to SEQ ID NO: 14725
  source 1..80: mol_type = other DNA

SEQ ID NO: 56207 - DNA, 80 bp, synthetic construct
  source 1..80: mol_type = other DNA
gagagaacaatctccgcttcaagagattgtcttaaatggaacatgcaaagcatcactgatatcgtttaccaaccacacat

SEQ ID NO: 56208 - DNA, 80 bp, synthetic construct
  source 1..80: mol_type = other DNA
taaataggagtaccatcttaccttcagggacggcccaggagtggggtagcagccacagaagtggtaacatctgtagcagc

SEQ ID NO: 56209 - DNA, 80 bp, synthetic construct
  source 1..80: mol_type = other DNA
ttgccagatcatttccaataggtgcccttgtcattttgtctaaaccaatcagagaagcgtagggtttaacatcatcagtc

SEQ ID NO: 56210 - DNA, 80 bp, synthetic construct
  source 1..80: mol_type = other DNA
cctctttggtttcaagctgtcagcctcagtctgtaagcgaccagctggctcttcagagcagtgccacctcctggcagaat

SEQ ID NO: 56211 - DNA, 80 bp, synthetic construct; identical to SEQ ID NO: 14726
  source 1..80: mol_type = other DNA

SEQ ID NO: 56212 - DNA, 80 bp, synthetic construct
  source 1..80: mol_type = other DNA
caggctcctaagacttgaaggaaaaacaatttggccagcagaacatgaaggaagagaaaaacacgccagggcaaagggta

SEQ ID NO: 56213 - DNA, 80 bp, synthetic construct
  source 1..80: mol_type = other DNA
agatcacgtgggccctgctacgccacaaggaggagcttgcttttacttagcagatgatagagatattaaaactggggaat

SEQ ID NO: 56214 - DNA, 80 bp, synthetic construct
  source 1..80: mol_type = other DNA
agttgcacatatacacaccactcctgtagcaatacagcaataatttaaatgacagataataagagcctgaattaagtcat

SEQ ID NO: 56215 - DNA, 80 bp, synthetic construct; identical to SEQ ID NO: 14727
  source 1..80: mol_type = other DNA

SEQ ID NO: 56216 - DNA, 80 bp, synthetic construct
  source 1..80: mol_type = other DNA
agtgaaacaaggacaaaagcatgcatgggctcaaaccccaaacctcataccagttatccaggatccagtcaggagcattt

SEQ ID NO: 56217 - DNA, 80 bp, synthetic construct
  source 1..80: mol_type = other DNA
cctgagctggaatctgtaaatctactcattgccttgtgagagacactgtcatagtcagttccaatctactagaaaggtgc

SEQ ID NO: 56218 - DNA, 80 bp, synthetic construct
  source 1..80: mol_type = other DNA
tctcttgccttctgatctcccatcagtgcctcctactggcagaatcaaaaaggaagccagatgtccaggaaggctgggaa

SEQ ID NO: 56219 - DNA, 80 bp, synthetic construct; identical to SEQ ID NO: 14728
  source 1..80: mol_type = other DNA

SEQ ID NO: 56220 - DNA, 80 bp, synthetic construct
  source 1..80: mol_type = other DNA
agtttgttagacaaaagaaagagaaagacagaaggggtgggggaagaggcagtgagaaagctctaatgtggcaatcaagt

SEQ ID NO: 56221 - DNA, 80 bp, synthetic construct
  source 1..80: mol_type = other DNA
ccagtcttgaacccccgagttcaagcgatcctcccgcctcagtagctggggactataggcacatgccactgtgcctggct

SEQ ID NO: 56222 - DNA, 80 bp, synthetic construct
  source 1..80: mol_type = other DNA
atggtaaccctccagaaaacaaaagaacatttcccagtatcccaacatttatgcactaacccatcagcggttctggcagt

SEQ ID NO: 56223 - DNA, 80 bp, synthetic construct; identical to SEQ ID NO: 14729
  source 1..80: mol_type = other DNA

SEQ ID NO: 56224 - DNA, 80 bp, synthetic construct
  source 1..80: mol_type = other DNA
tttttatttatggacactaaaattcaaatttcatgtaattttcatgtgtcacgaaatattcttcatttgctttttttttc

SEQ ID NO: 56225 - DNA, 80 bp, synthetic construct
  source 1..80: mol_type = other DNA
gaacctcagtccccttattattggattggcaatcagttaacaaacactttgtgccagttacaccagtctatttggaagga

SEQ ID NO: 56226 - DNA, 80 bp, synthetic construct
  source 1..80: mol_type = other DNA
catccctcaccaagactgtggtgaggggtggttaactccattctccccttctataatctcagtttaaatggtaacaagtt

SEQ ID NO: 56227 - DNA, 80 bp, synthetic construct; identical to SEQ ID NO: 14730
  source 1..80: mol_type = other DNA

SEQ ID NO: 56228 - DNA, 80 bp, synthetic construct
  source 1..80: mol_type = other DNA
actaaaaatacaaaaaaaaaaaaaattagccaggcgtgatggcgggtgcctgtaatccaagctactcaggaggctgaggc

SEQ ID NO: 56229 - DNA, 80 bp, synthetic construct
  source 1..80: mol_type = other DNA
tggaaaagtcatgggcaactgtggccccgctcccattcttgccatttaatcttttaactctcaacaatgcaattgttcac

SEQ ID NO: 56230 - DNA, 80 bp, synthetic construct
  source 1..80: mol_type = other DNA
tgggactcctttctttcagcaaccctttaagtattggtgttccctggagttttgtcctcaacctttactcttcttagact

SEQ ID NO: 56231 - DNA, 80 bp, synthetic construct; identical to SEQ ID NO: 14731
  source 1..80: mol_type = other DNA

SEQ ID NO: 56232 - DNA, 80 bp, synthetic construct
  source 1..80: mol_type = other DNA
caagcaatagaaaccaattctggctaacttacattttaaaaatgaggatttattggaaagatactgatctaactcatgaa

SEQ ID NO: 56233 - DNA, 80 bp, synthetic construct
  source 1..80: mol_type = other DNA
ttgtattaggtgtgtaccactggattcattggttgtggccaggtacagtattacctctatggattagagctattcctaga

SEQ ID NO: 56234 - DNA, 80 bp, synthetic construct
  source 1..80: mol_type = other DNA
ctcaaacagcatttcctaactactcaggtgacatatgtcatctgcttgatgatctctggtcggtcacttgtcttatcaca

SEQ ID NO: 56235 - DNA, 80 bp, synthetic construct; identical to SEQ ID NO: 14732
  source 1..80: mol_type = other DNA

SEQ ID NO: 56236 - DNA, 80 bp, synthetic construct
  source 1..80: mol_type = other DNA
cctagttatctcaaaaatgtgtaagagaatgaagttttaaatgaaaagcagtgtcttataattttcaaaccgtgccatta

SEQ ID NO: 56237 - DNA, 80 bp, synthetic construct
  source 1..80: mol_type = other DNA
ttcccaatatattccaactcctctcttatatttaagacttcagtgaataacaagatgtccacccgagctacaaatgtggg

SEQ ID NO: 56238 - DNA, 80 bp, synthetic construct
  source 1..80: mol_type = other DNA
attggtctctctctctccaatcttattattttccacagtgctgccagaaggatatttttattatgcttagttgatcatat

SEQ ID NO: 56239 - DNA, 80 bp, synthetic construct; identical to SEQ ID NO: 14733
  source 1..80: mol_type = other DNA

SEQ ID NO: 56240 - DNA, 80 bp, synthetic construct
  source 1..80: mol_type = other DNA
caggtattagatgatgatggattgtcccttctaacagatgtttcaaaggtaaatcttatcaggtttatctataagccatt

SEQ ID NO: 56241 - DNA, 80 bp, synthetic construct
  source 1..80: mol_type = other DNA
ggctaattttttttttttttttgtatttttagtagagatggggtttcactgtgttagccaggataatcttgatctcctga

SEQ ID NO: 56242 - DNA, 80 bp, synthetic construct
  source 1..80: mol_type = other DNA
taccattttcttcctactccctgccacctcctgtttcagagagcaaacctagccatccagctcccacatttactcttatt

SEQ ID NO: 56243 - DNA, 80 bp, synthetic construct; identical to SEQ ID NO: 14734
  source 1..80: mol_type = other DNA

SEQ ID NO: 56244 - DNA, 80 bp, synthetic construct
  source 1..80: mol_type = other DNA
tataaaaattaatggtgcttctggatacaaacagtaaactagtgggaaaagaaatcaaagaaagtaatcccatttacaat

SEQ ID NO: 56245 - DNA, 80 bp, synthetic construct
  source 1..80: mol_type = other DNA
atcgtgaaaatgactgtactaccaaaagcaatctacagatttgttgcaattcctatcaaaatacaaagatattccttgca

SEQ ID NO: 56246 - DNA, 80 bp, synthetic construct
  source 1..80: mol_type = other DNA
aaacagatacacagaccaatagaaccgaataaaggacccagaaataatagatccacatcttaacagccaactgattttca

SEQ ID NO: 56247 - DNA, 80 bp, synthetic construct; identical to SEQ ID NO: 14735
  source 1..80: mol_type = other DNA

SEQ ID NO: 56248 - DNA, 80 bp, synthetic construct
  source 1..80: mol_type = other DNA
atatataaggaactcaaactcaacagcaaaaatcctccaaataatcccatttgaaaatgggcaaatgatctgaatagaca

SEQ ID NO: 56249 - DNA, 80 bp, synthetic construct
  source 1..80: mol_type = other DNA
gcaaagaaaggggaatgctcatatactgatggtagaaatgtaaattaacatagccactatggaaaacagcataaaggttc

SEQ ID NO: 56250 - DNA, 80 bp, synthetic construct
  source 1..80: mol_type = other DNA
tatcaagtgactggataaagaaaatgtggtgtatatatatacaatggatactagtcagccataaaaaagaatgaaatcct

SEQ ID NO: 56251 - DNA, 80 bp, synthetic construct; identical to SEQ ID NO: 14736
  source 1..80: mol_type = other DNA

SEQ ID NO: 56252 - DNA, 80 bp, synthetic construct
  source 1..80: mol_type = other DNA
caaaatatcatatgtaccccataaatatgtacaattattatgtatcaataaaaaataaaaaaaaacaattcagaagtcca

SEQ ID NO: 56253 - DNA, 80 bp, synthetic construct
  source 1..80: mol_type = other DNA
tatagttgttacagacatcttaaaatatcacttacaattatgggagctgttaaacttgccaaaaaatcatgctttttaat

SEQ ID NO: 56254 - DNA, 80 bp, synthetic construct
  source 1..80: mol_type = other DNA
aatttgcacaggaagagattaacaacaaaataggacaattatattgtaataaaagttatgtgaatatggtctttctgtct

SEQ ID NO: 56255 - DNA, 80 bp, synthetic construct; identical to SEQ ID NO: 14737
  source 1..80: mol_type = other DNA

SEQ ID NO: 56256 - DNA, 80 bp, synthetic construct
  source 1..80: mol_type = other DNA
aacccaaagctcaatccttcaccctaaattgtttttataccccctcttttacaaacctcagctaccttcgtggctgattc

SEQ ID NO: 56257 - DNA, 80 bp, synthetic construct
  source 1..80: mol_type = other DNA
gtgaccttaggtaaatattacctgctatggtttgaatctctcctccaaaactcttgttgaaaataattgccattttgaca

SEQ ID NO: 56258 - DNA, 80 bp, synthetic construct
  source 1..80: mol_type = other DNA
ccgaggcaggtggatcatgaggtcaggagatggagaccatcctggctaacacggtgaaaccccgtccctactaaaaatac

SEQ ID NO: 56259 - DNA, 80 bp, synthetic construct; identical to SEQ ID NO: 14738
  source 1..80: mol_type = other DNA

SEQ ID NO: 56260 - DNA, 80 bp, synthetic construct
  source 1..80: mol_type = other DNA
atttgaaaactgagggtgataatattagtattgactttatagggttataaggattaaaagagttactacatgtactcatt

SEQ ID NO: 56261 - DNA, 80 bp, synthetic construct
  source 1..80: mol_type = other DNA
agtcaaaaaatttcagtggttccccactgattccaaacttaacagcactggaaaccttctataatgtgttctctaatata

SEQ ID NO: 56262 - DNA, 80 bp, synthetic construct
  source 1..80: mol_type = other DNA
tatgattattcccctatacatggcaccccataaaacatacacatttcaatcttacctaagtcacatacttacttacacat

SEQ ID NO: 56263 - DNA, 80 bp, synthetic construct; identical to SEQ ID NO: 14739
  source 1..80: mol_type = other DNA

SEQ ID NO: 56264 - DNA, 80 bp, synthetic construct
  source 1..80: mol_type = other DNA
agaggaagtggttagacatgaggctggaaagctaggcagactgttttggcaaacataggaatttggactttatcacatag

SEQ ID NO: 56265 - DNA, 80 bp, synthetic construct
  source 1..80: mol_type = other DNA
ctgtaatcccagcactttgggaggctgaggcgggcggatcacgaggtcaggaattcgagactaatttggccaacatggtg

SEQ ID NO: 56266 - DNA, 80 bp, synthetic construct
  source 1..80: mol_type = other DNA
gcaagactccgtatcagggaaagaaaaaaacaacttcttgcaatgacacaaatgttcaataatctgtgctttcccatatg

SEQ ID NO: 56267 - DNA, 80 bp, synthetic construct; identical to SEQ ID NO: 14740
  source 1..80: mol_type = other DNA

SEQ ID NO: 56268 - DNA, 80 bp, synthetic construct
  source 1..80: mol_type = other DNA
agtgggaatatttagtagaaagtttagcttagagagctgtctgaactaaagattcagacttcagaggctttgagccatgg

SEQ ID NO: 56269 - DNA, 80 bp, synthetic construct
  source 1..80: mol_type = other DNA
agggtagagagaatgtcaggaaggaaacatgatcaaatgtcgaatgcctcagaggtcaaataaagtgagaactgtaaagt

SEQ ID NO: 56270 - DNA, 80 bp, synthetic construct
  source 1..80: mol_type = other DNA
ttgagatagtaaggataatttcaatttcaggtcttggctgtgcaaggaagccgagagacatgagtctctaagagggcacg

SEQ ID NO: 56271 - DNA, 80 bp, synthetic construct; identical to SEQ ID NO: 14741
  source 1..80: mol_type = other DNA

SEQ ID NO: 56272 - DNA, 80 bp, synthetic construct
  source 1..80: mol_type = other DNA
caaaattttggggggaattcactcaagcttgggagaggagagatcataactttaagagtataagaggtttaaacggtcca

SEQ ID NO: 56273 - DNA, 80 bp, synthetic construct
  source 1..80: mol_type = other DNA
acatctgcggtccgcaccttatctctccgcgcggcaggcgcgacgagggcgagaaactccctctccagtggtcgcaccac

SEQ ID NO: 56274 - DNA, 80 bp, synthetic construct
  source 1..80: mol_type = other DNA
cacccgaggctaccccgctaggccgcgggtagtgggggagggggcgctgaggcaggaggtcagcacccgggcgcgggctc

SEQ ID NO: 56275 - DNA, 80 bp, synthetic construct; identical to SEQ ID NO: 14742
  source 1..80: mol_type = other DNA

SEQ ID NO: 56276 - DNA, 80 bp, synthetic construct
  source 1..80: mol_type = other DNA
gtcagccaatctgggtgctgctgacgtggccgcgcggccccgatgctctccccacccccccagcccgttcgggaagggag

SEQ ID NO: 56277 - DNA, 80 bp, synthetic construct
  source 1..80: mol_type = other DNA
cagtcaagtgcttaaccaatggtggggagtccgggagggggattcttggggttcaggaaagaatcctgagagtgggaaga

SEQ ID NO: 56278 - DNA, 80 bp, synthetic construct
  source 1..80: mol_type = other DNA
tgggggtacagcagccgggagccaggtgagaagggatccatcggcggccgagggaggggtgacctggcggtgggctgagg

SEQ ID NO: 56279 - DNA, 80 bp, synthetic construct; identical to SEQ ID NO: 14743
  source 1..80: mol_type = other DNA

SEQ ID NO: 56280 - DNA, 80 bp, synthetic construct
  source 1..80: mol_type = other DNA
tcgggacctggaatgatttcacagctcccaaggtttcgggtttctccagggtggcctcttccatcgcctccctcatcccc

SEQ ID NO: 56281 - DNA, 80 bp, synthetic construct
  source 1..80: mol_type = other DNA
gcagggaataaacgagagcaatgtctggctgcccttttcctaaggcctagtattttctcagcctcctaagtttttattcc

SEQ ID NO: 56282 - DNA, 80 bp, synthetic construct
  source 1..80: mol_type = other DNA
cttttgggggccagggcctgatccctggctgggggaaggggactctgctctcctgacgctcattttcccccgccctcccg

SEQ ID NO: 56283 - DNA, 80 bp, synthetic construct; identical to SEQ ID NO: 14744
  source 1..80: mol_type = other DNA

SEQ ID NO: 56284 - DNA, 80 bp, synthetic construct
  source 1..80: mol_type = other DNA
tctgggctctggttgattcacagagtctgcacccttatttagataaccaagttaggaggaagacttaagagtaagttggg

SEQ ID NO: 56285 - DNA, 80 bp, synthetic construct
  source 1..80: mol_type = other DNA
gctccgtggggaggactccggaccctggtgggggggcgggggggttctttcgcccccgtggcggagggcccctgagaggc

SEQ ID NO: 56286 - DNA, 80 bp, synthetic construct
  source 1..80: mol_type = other DNA
ttgcattgtatagggtagatggatgcgtttggagattttaatcccacttttagggttgccgaggatttttcgaacgagca

SEQ ID NO: 56287 - DNA, 80 bp, synthetic construct; identical to SEQ ID NO: 14745
  source 1..80: mol_type = other DNA

SEQ ID NO: 56288 - DNA, 80 bp, synthetic construct
  source 1..80: mol_type = other DNA
gcgacccctcccgtttccctgctttggccaatggaggagctacgaatggcacgacctgctcgagcttggcagtctccagt

SEQ ID NO: 56289 - DNA, 80 bp, synthetic construct
  source 1..80: mol_type = other DNA
ttgccacttccctgtgggtctctgcggcactcttctgcctggtgactgacaccttggaaatgaagtttatgacgtcatcg

SEQ ID NO: 56290 - DNA, 80 bp, synthetic construct
  source 1..80: mol_type = other DNA
atataaagggctggcgcggggctcggcggcgccatttcgtgctggagtggagcagcctctagaacgagctggaggattct

SEQ ID NO: 56291 - DNA, 80 bp, synthetic construct; identical to SEQ ID NO: 14746
  source 1..80: mol_type = other DNA

SEQ ID NO: 56292 - DNA, 80 bp, synthetic construct
  source 1..80: mol_type = other DNA
cgcctcagctgaggccgccgccattttcttgctgtccgccgtctgcagagcgcgccaagctgcccggagctctccgagag

SEQ ID NO: 56293 - DNA, 80 bp, synthetic construct
  source 1..80: mol_type = other DNA
ttgcggtcaagatgctgcaaaacgtgactccccacaataagtacgtttccgcgagccgcgtgtgggaaggggatgttgca

SEQ ID NO: 56294 - DNA, 80 bp, synthetic construct
  source 1..80: mol_type = other DNA
aggttgtcaatttatacgctattaatgccgccgtggcccagtcttaaccgagtcaggcagagctagtttgacggtggagt

SEQ ID NO: 56295 - DNA, 80 bp, synthetic construct; identical to SEQ ID NO: 14747
  source 1..80: mol_type = other DNA

SEQ ID NO: 56296 - DNA, 80 bp, synthetic construct
  source 1..80: mol_type = other DNA
ctaaggttcctagttcagctctgcgatgtaaacaatgagattcccatatgatgttttaattcttaggtggtaggaaagac

SEQ ID NO: 56297 - DNA, 80 bp, synthetic construct
  source 1..80: mol_type = other DNA
gctatcacttggtgaccttgactgttttgtacggctttttgacttccttggagtgaggagactctgatttggtgcgaata

SEQ ID NO: 56298 - DNA, 80 bp, synthetic construct
  source 1..80: mol_type = other DNA
aactacccagaccttgtggaagatggtgctctctcttctatctaggtggattattctgtgtcttatcagcattttatgga

SEQ ID NO: 56299 - DNA, 80 bp, synthetic construct
  source 1..80: mol_type = other DNA
gtgccttgtcagaaacaatttgggagttttttaaaatatgaaaaagaacagatagagcctatcagacttaagaaggtggg

SEQ ID NO: 56300 - DNA, 80 bp, synthetic construct; identical to SEQ ID NO: 14748
  source 1..80: mol_type = other DNA

SEQ ID NO: 56301 - DNA, 80 bp, synthetic construct
  source 1..80: mol_type = other DNA
aggacgagttaccaaccagctgcaatacctacacaaggtagtgatgaaggctctgtggaaacatcagttcgcatggccat

SEQ ID NO: 56302 - DNA, 80 bp, synthetic construct
  source 1..80: mol_type = other DNA
gttagctaccagatttctgggtatcttggtcctttgtgattgatccgaccgcttgctgtaactatcttggcatctttcct

SEQ ID NO: 56303 - DNA, 80 bp, synthetic construct
  source 1..80: mol_type = other DNA
gggaagtttccagagtgggtgggaggtgggtggttagagaaaggcagcaggggcctccctgtggatgtcaagaatctttt

SEQ ID NO: 56304 - DNA, 80 bp, synthetic construct; identical to SEQ ID NO: 14749
  source 1..80: mol_type = other DNA

SEQ ID NO: 56305 - DNA, 80 bp, synthetic construct
  source 1..80: mol_type = other DNA
atcctttgctactgaaggtgttatccaggtagggtagtcggagtcttaaaaacctgactctagatggtactattgaacac

SEQ ID NO: 56306 - DNA, 80 bp, synthetic construct
  source 1..80: mol_type = other DNA
cagctctcaagttttttcttctttcgaattttgggagacagttaggagaaagtggaaattagtagtggcctggagtagga

SEQ ID NO: 56307 - DNA, 80 bp, synthetic construct
  source 1..80: mol_type = other DNA
cctaatggcacaaacgctggaaaagatattcctacagaaggttgcatcaatgccacaagaagaacaagagctggtagtga

SEQ ID NO: 56308 - DNA, 80 bp, synthetic construct; identical to SEQ ID NO: 14750
  source 1..80: mol_type = other DNA

SEQ ID NO: 56309 - DNA, 80 bp, synthetic construct
  source 1..80: mol_type = other DNA
agtgacaggttccctatcttgtttctttctgcagaaaaaaggcgtaaagcggaaagcagatactaccacccctacaccta

SEQ ID NO: 56310 - DNA, 80 bp, synthetic construct
  source 1..80: mol_type = other DNA
aaagctttcagaacagttaaaacattgcaatggcattttgaaggagttactctctaagaagcatgctgcctatgcttggc

SEQ ID NO: 56311 - DNA, 80 bp, synthetic construct
  source 1..80: mol_type = other DNA
ttatgtgggcacacagcagtctttggttcttggcattttacttttataaaataatagtggaacagaaggtctggtgtttt

SEQ ID NO: 56312 - DNA, 80 bp, synthetic construct; identical to SEQ ID NO: 14751
  source 1..80: mol_type = other DNA

SEQ ID NO: 56313 - DNA, 80 bp, synthetic construct
  source 1..80: mol_type = other DNA
ctgatgtacggcttatgttctccaactgctataagtacaatcccccagatcacgatgttgtggcaatggcacgaaagcta

SEQ ID NO: 56314 - DNA, 80 bp, synthetic construct
  source 1..80: mol_type = other DNA
catagttttgagtttgtgcctctttgtaggatgtatttgagttccgttatgccaagatgccagatgaaccactagaacca

SEQ ID NO: 56315 - DNA, 80 bp, synthetic construct
  source 1..80: mol_type = other DNA
aagaaagggctcatcgcttagcagaactacaggaacaggtattttgtcactcttgaaagtttttattgggtaagaggttc

SEQ ID NO: 56316 - DNA, 80 bp, synthetic construct; identical to SEQ ID NO: 14752
  source 1..80: mol_type = other DNA

SEQ ID NO: 56317 - DNA, 80 bp, synthetic construct
  source 1..80: mol_type = other DNA
agagactagtttggctatttctgtctctctgggggatgccatctctctttgcaaagataattctaaatggccagttaaca

SEQ ID NO: 56318 - DNA, 80 bp, synthetic construct
  source 1..80: mol_type = other DNA
gcagcctggatatgtaccatgcgcacttcacagtagggttcatgcttctatgagaatctaatgcttctgctgatgtgaca

SEQ ID NO: 56319 - DNA, 80 bp, synthetic construct
  source 1..80: mol_type = other DNA
aagatggctgtgttccaaaaagactttatttgcaaagacacgtggcgatcagatttgttctctgggccatatagtttgcc

SEQ ID NO: 56320 - DNA, 80 bp, synthetic construct
  source 1..80: mol_type = other DNA
tgcaacctccacttctcgggttcaagcgattctcctgcctcagcctcccaagtagccaggattacaggcatgcgccacca

SEQ ID NO: 56321 - DNA, 80 bp, synthetic construct; identical to SEQ ID NO: 14753
  source 1..80: mol_type = other DNA

SEQ ID NO: 56322 - DNA, 80 bp, synthetic construct
  source 1..80: mol_type = other DNA
acattgtctttttaaagacatgttattgcctacttacagtcgagcaaaatgctctgtttcactatacagtgtcccagtag

SEQ ID NO: 56323 - DNA, 80 bp, synthetic construct
  source 1..80: mol_type = other DNA
gggaacatactggaagaggttaatgaagcttcttttgctgacaactctttttgcccttaggctccccaaaaaggccacaa

SEQ ID NO: 56324 - DNA, 80 bp, synthetic construct
  source 1..80: mol_type = other DNA
ctctttacgtgattcaaacccagaagagattgagattgattttgaaacactcaagccatccacacttagagagcttgagc

SEQ ID NO: 56325 - DNA, 80 bp, synthetic construct
  source 1..80: mol_type = other DNA
gctgacgttcaagaagggaacttgggaaccttaggggcccataataagatgcttggggcaatcttaatgtatcctgataa

SEQ ID NO: 56326 - DNA, 80 bp, synthetic construct; identical to SEQ ID NO: 14754
  source 1..80: mol_type = other DNA

SEQ ID NO: 56327 - DNA, 80 bp, synthetic construct
  source 1..80: mol_type = other DNA
ccagctcagattccagctcctcctcttcctcgtcgtcgtcttcagacaccagtgattcagactcaggctaaggggtcagg

SEQ ID NO: 56328 - DNA, 80 bp, synthetic construct
  source 1..80: mol_type = other DNA
aaggagggacatggacaaaacaacattgaattcccagccccattggggagtgatctcttggacacagagcccccattcaa

SEQ ID NO: 56329 - DNA, 80 bp, synthetic construct
  source 1..80: mol_type = other DNA
cagcctccatggggagggaagaagggggagctctttttttacgttgatttttttttttctactctgttttccctttttcc

SEQ ID NO: 56330 - DNA, 80 bp, synthetic construct; identical to SEQ ID NO: 14755
  source 1..80: mol_type = other DNA

SEQ ID NO: 56331 - DNA, 80 bp, synthetic construct
  source 1..80: mol_type = other DNA
aggctttaggtttttccctgtggcactggatgtgtgaattttctcctgagcagacttaaaatatgagaaaagggtgggag

SEQ ID NO: 56332 - DNA, 80 bp, synthetic construct
  source 1..80: mol_type = other DNA
aggtggcgggtacctgtagtcccagctactcgggaggctgaggcagcagaatggcgtgaactcgggaggcggggttcagt

SEQ ID NO: 56333 - DNA, 80 bp, synthetic construct
  source 1..80: mol_type = other DNA
tccaacgattaaatcacaaaactgtgctttctgcatacccccttgtcttgctaaggggagagaagggttgtataaaaagt

SEQ ID NO: 56334 - DNA, 80 bp, synthetic construct; identical to SEQ ID NO: 14756
  source 1..80: mol_type = other DNA

SEQ ID NO: 56335 - DNA, 80 bp, synthetic construct
  source 1..80: mol_type = other DNA
gaaagctcttgagctccctttgagctctggttcccttttgagaataacagatgttgaggattcgtaagtacttaatagac

SEQ ID NO: 56336 - DNA, 80 bp, synthetic construct
  source 1..80: mol_type = other DNA
gtctgactgcagccccttctgctcatgtacttttaaggtttgttttctgtagttcggaaaaataaaagtttcaacctgac

SEQ ID NO: 56337 - DNA, 80 bp, synthetic construct
  source 1..80: mol_type = other DNA
gtctcacttagggattgtaattgtttcaggagtttggttgagttccatcttggttgccaaaggactttattccaaaatag

SEQ ID NO: 56338 - DNA, 80 bp, synthetic construct; identical to SEQ ID NO: 14757
  source 1..80: mol_type = other DNA

SEQ ID NO: 56339 - DNA, 80 bp, synthetic construct
  source 1..80: mol_type = other DNA
tggtgtggtaattatactgattgaatccaagatataggcatgacttggtcttcacagaccatccttattgtgcacccata

SEQ ID NO: 56340 - DNA, 80 bp, synthetic construct
  source 1..80: mol_type = other DNA
tgcaagactggaggaagattttcctgagcaattagagagtggctgtaatggagagctgggaaggagatgtgggaatggta

SEQ ID NO: 56341 - DNA, 80 bp, synthetic construct
  source 1..80: mol_type = other DNA
caatttatattctaggatcggggaaaggggcagcattagacaactagtcacacgatttttaacaaaaataagtaattcta

SEQ ID NO: 56342 - DNA, 80 bp, synthetic construct
  source 1..80: mol_type = other DNA
gcaactgagaaggtaactaggtgatgctgaagcagcaaggatgaaggtgagtgctttgagatgctttgaatttacatctc

SEQ ID NO: 56343 - DNA, 80 bp, synthetic construct; identical to SEQ ID NO: 14758
  source 1..80: mol_type = other DNA

SEQ ID NO: 56344 - DNA, 80 bp, synthetic construct
  source 1..80: mol_type = other DNA
gatagtttagaaagcaattgcagcagttaatcccagccagtgagaatagtggtgtagaagagaaaggcagcaatgtagat

SEQ ID NO: 56345 - DNA, 80 bp, synthetic construct
  source 1..80: mol_type = other DNA
acagctctcagagtccctagcacagagctttccaatagtggaagcttgatattttgttgactaaaggagtgccacctggc

SEQ ID NO: 56346 - DNA, 80 bp, synthetic construct
  source 1..80: mol_type = other DNA
ccgaggttaggtggttcttcccttcttactttcctaaacttcaactcttaaaatgtgagccttcatttttatgacccaga

SEQ ID NO: 56347 - DNA, 80 bp, synthetic construct; identical to SEQ ID NO: 14759
  source 1..80: mol_type = other DNA

SEQ ID NO: 56348 - DNA, 80 bp, synthetic construct
  source 1..80: mol_type = other DNA
ttttatttgcacagtatttttaagcaagtttacccattcctctggaggcacctcccacccataaaatctgtgtctctgtt

SEQ ID NO: 56349 - DNA, 80 bp, synthetic construct
  source 1..80: mol_type = other DNA
ggagaatgagtgccaaagtgaagtggggaagccccttataaaaccataagatctcgtgagaactcactatcacgagaaca

SEQ ID NO: 56350 - DNA, 80 bp, synthetic construct
  source 1..80: mol_type = other DNA
agtccccagcttttttggcaccaaggactggttttgtggaagacaacttttctatggatggaggcggggagaatggtttc

SEQ ID NO: 56351 - DNA, 80 bp, synthetic construct; identical to SEQ ID NO: 14760
  source 1..80: mol_type = other DNA

SEQ ID NO: 56352 - DNA, 80 bp, synthetic construct
  source 1..80: mol_type = other DNA
gacatttagtaacagttctatagctgcctagtttcttccccttattctcccccaactccctgttcagccattgaggtctg

SEQ ID NO: 56353 - DNA, 80 bp, synthetic construct
  source 1..80: mol_type = other DNA
acctcccttcctgggttatcatcagacctgtcacttgcagtgaggcctcacctcaactaaggaggtcaaaataagaataa

SEQ ID NO: 56354 - DNA, 80 bp, synthetic construct
  source 1..80: mol_type = other DNA
gacaagctaatgtttgatttgagattgaaggagaaaagggatttattctccagcgataagcatttttgctggtgtttgac

SEQ ID NO: 56355 - DNA, 80 bp, synthetic construct; identical to SEQ ID NO: 14761
  source 1..80: mol_type = other DNA

SEQ ID NO: 56356 - DNA, 80 bp, synthetic construct
  source 1..80: mol_type = other DNA
ctgcctcccaggttcaagcagttctcgtgcctcagcctcccaagtagctggagactacaggtgtgcaccaccgcacccag

SEQ ID NO: 56357 - DNA, 80 bp, synthetic construct
  source 1..80: mol_type = other DNA
agcagttctcaaggttttctaagtttacttatactcttttaactcttaagtaaccccaggtaagtggaagctgaaaagtt

SEQ ID NO: 56358 - DNA, 80 bp, synthetic construct
  source 1..80: mol_type = other DNA
tattctgtattcttgatttaagaaagcactggcactgcccaatctctgtgccctttgattgctatgtcaagcttcaggtt

SEQ ID NO: 56359 - DNA, 80 bp, synthetic construct
  source 1..80: mol_type = other DNA
gcattctgttctggacctgtttccaaccacaataacacaacccactgatttactgttcttaaatccatctctgctattca

SEQ ID NO: 56360 - DNA, 80 bp, synthetic construct; identical to SEQ ID NO: 14762
  source 1..80: mol_type = other DNA

SEQ ID NO: 56361 - DNA, 80 bp, synthetic construct
  source 1..80: mol_type = other DNA
tgagccgttgctatctgccaggtgtatattgatgggcacttttcatagtcatcttttttggtccacatgacgttcctacc

SEQ ID NO: 56362 - DNA, 80 bp, synthetic construct
  source 1..80: mol_type = other DNA
cagaagtaaaacttagcaaaaacttccagatattgttaactccaccaacctgagctaaagaatgaggctagagatgaaca

SEQ ID NO: 56363 - DNA, 80 bp, synthetic construct
  source 1..80: mol_type = other DNA
tcactgcaacctccacctcctgggttcaagcaattctcctgcttcagcctcccaagtagctgggattacaggcacctgcc

SEQ ID NO: 56364 - DNA, 80 bp, synthetic construct; identical to SEQ ID NO: 14763
  source 1..80: mol_type = other DNA

SEQ ID NO: 56365 - DNA, 80 bp, synthetic construct
  source 1..80: mol_type = other DNA
gcatacccatagcttagctcctacttacaagtgagtgttaaattaggtttagcctaaagctgcttccttacatgttttaa

SEQ ID NO: 56366 - DNA, 80 bp, synthetic construct
  source 1..80: mol_type = other DNA
atcctgctgtttctgtacctcatgtctgttttctgtacatcactttactttttctgttcataaatattccaccacttggc

SEQ ID NO: 56367 - DNA, 80 bp, synthetic construct
  source 1..80: mol_type = other DNA
ttaggaaaatggtccagttccatccaagttgctggaaaatatattatttcattcttttttatggatgagtacgatttcat

SEQ ID NO: 56368 - DNA, 80 bp, synthetic construct; identical to SEQ ID NO: 14764
  source 1..80: mol_type = other DNA

SEQ ID NO: 56369 - DNA, 80 bp, synthetic construct
  source 1..80: mol_type = other DNA
gctgaggtgggagttcaagaccagcctgaccaacatggagaaaccccatctctactaaaaatacaaaattagctgggcat

SEQ ID NO: 56370 - DNA, 80 bp, synthetic construct
  source 1..80: mol_type = other DNA
atttccctgatgatagtgatgttgaacatttttacatatgtttctggacatttgtatatcttcttttgagaaatgtctgt

SEQ ID NO: 56371 - DNA, 80 bp, synthetic construct; identical to SEQ ID NO: 14765
  source 1..80: mol_type = other DNA

SEQ ID NO: 56372 - DNA, 80 bp, synthetic construct
  source 1..80: mol_type = other DNA
tttttatttttatttttttttgagatggagtcttgtttgtcacccaggctagagtgcaatggtacggtctcggctcactg

SEQ ID NO: 56373 - DNA, 80 bp, synthetic construct
  source 1..80: mol_type = other DNA
actatgttggccaggctgatctcaaactcctgacctcatgatccacccacctcagcctcccaaaatgctgggattacagg

SEQ ID NO: 56374 - DNA, 80 bp, synthetic construct
  source 1..80: mol_type = other DNA
ctctattctgttccattgatctactgtgtacttttataccggtaccatgctgttttggttactctagccttgtagtgtaa

SEQ ID NO: 56375 - DNA, 80 bp, synthetic construct; identical to SEQ ID NO: 14766
  source 1..80: mol_type = other DNA

SEQ ID NO: 56376 - DNA, 80 bp, synthetic construct
  source 1..80: mol_type = other DNA
ggtatagagctgtgttattgatttgtgtatgttgattttgtaacctgagactttactgaattcatttatcaaatctaaga

SEQ ID NO: 56377 - DNA, 80 bp, synthetic construct
  source 1..80: mol_type = other DNA
gacatctttgtcttgtccagttcttagggggactggacaagttcccctggacagtttttgtttttttgtgtgtgtgagac

SEQ ID NO: 56378 - DNA, 80 bp, synthetic construct
  source 1..80: mol_type = other DNA
ttttttttttttagtagagatgaggtttcactattgttgaccagactggtgtcgaactcctgacctcaggtgaattgccc

SEQ ID NO: 56379 - DNA, 80 bp, synthetic construct; identical to SEQ ID NO: 14767
  source 1..80: mol_type = other DNA

SEQ ID NO: 56380 - DNA, 80 bp, synthetic construct
  source 1..80: mol_type = other DNA
gaatattgttctgtagttttcctttttgttgtgttctttcctggctttggcatcaggtaacactggcttcacagaatgag

SEQ ID NO: 56381 - DNA, 80 bp, synthetic construct
  source 1..80: mol_type = other DNA
tactggtttgttcaggatttctatttgttcctgattcaagcttagagggttgtatgcttccaggagttcattcatttcct

SEQ ID NO: 56382 - DNA, 80 bp, synthetic construct
  source 1..80: mol_type = other DNA
tccattttcttctatgttcttaaatgcagcttctacacaagattcctgcatactgtagaaaattttatttttttcaccaa

SEQ ID NO: 56383 - DNA, 80 bp, synthetic construct; identical to SEQ ID NO: 14768
  source 1..80: mol_type = other DNA

SEQ ID NO: 56384 - DNA, 80 bp, synthetic construct
  source 1..80: mol_type = other DNA
tagtaccttcttcatttttactttttttttttttggtttttttttttttttttttttttgaaatggagtctcgctttgtc

SEQ ID NO: 56385 - DNA, 80 bp, synthetic construct
  source 1..80: mol_type = other DNA
ccgtgttagccaggatggtctcgatctcctgacctcgtgatccgcccgcctcggcctcccaaagtgctgggattacaggc

SEQ ID NO: 56386 - DNA, 80 bp, synthetic construct
  source 1..80: mol_type = other DNA
ttatataacattttaatgtcttataaaaacaaaattatatgacatttttctaggtgaacttattcttggtgttcctggga

SEQ ID NO: 56387 - DNA, 80 bp, synthetic construct; identical to SEQ ID NO: 14769
  source 1..80: mol_type = other DNA

SEQ ID NO: 56388 - DNA, 80 bp, synthetic construct
  source 1..80: mol_type = other DNA
tcgagaccagcctggccaacctggtgaaaccctgcctctactaaaaatacaaaaattagttgggcgtggtcgtgggcgcc

SEQ ID NO: 56389 - DNA, 80 bp, synthetic construct
  source 1..80: mol_type = other DNA
tcaacttgtgagttcaggaatctagtgctctctcctttaatttcctgctattttcaagtataataaagcattacacacac

SEQ ID NO: 56390 - DNA, 80 bp, synthetic construct
  source 1..80: mol_type = other DNA
tatattagtaaatcattagttaaaactgacatttctagttcaaaatatttttctagttcaaatttaatattattgtttta

SEQ ID NO: 56391 - DNA, 80 bp, synthetic construct; identical to SEQ ID NO: 14770
  source 1..80: mol_type = other DNA

SEQ ID NO: 56392 - DNA, 80 bp, synthetic construct
  source 1..80: mol_type = other DNA
gcctccagaactgtgagaaacaaatttctttcttttctttttttttttttttttttttttttttggtaaattacctagtc

SEQ ID NO: 56393 - DNA, 80 bp, synthetic construct
  source 1..80: mol_type = other DNA
tagcataaagatgacttgatacataaccgtggtactgtaatcatactaaacaaaactgaaaacagctctctaatatcatc

SEQ ID NO: 56394 - DNA, 80 bp, synthetic construct
  source 1..80: mol_type = other DNA
acaaggccagtagaatctctcacattttgaatttgtgtgattggttctttgtggtttcatttgacttattcctctatcca

SEQ ID NO: 56395 - DNA, 80 bp, synthetic construct; identical to SEQ ID NO: 14771
  source 1..80: mol_type = other DNA

SEQ ID NO: 56396 - DNA, 80 bp, synthetic construct
  source 1..80: mol_type = other DNA
ctggtactctgaagggtagaccttttttcatcagtggaacatttccttgtgaaatgtcaggatatatacttgttttcttt

SEQ ID NO: 56397 - DNA, 80 bp, synthetic construct
  source 1..80: mol_type = other DNA
atgtctgagttgttccagttttggccaatggaagctccttcaaactggctgacctgtttttttgacatgactctattagt

SEQ ID NO: 56398 - DNA, 80 bp, synthetic construct
  source 1..80: mol_type = other DNA
atgatatttacacactacaatctgtgcattgaggatgctcattgctacagggctactattaggctctttcatttgctaga

SEQ ID NO: 56399 - DNA, 80 bp, synthetic construct; identical to SEQ ID NO: 14772
  source 1..80: mol_type = other DNA

SEQ ID NO: 56400 - DNA, 80 bp, synthetic construct
  source 1..80: mol_type = other DNA
gggattacagggatgagccactgcccccggcctaaaaatcttagttcttaattatattaacataatcactgatttgcttt

SEQ ID NO: 56401 - DNA, 80 bp, synthetic construct
  source 1..80: mol_type = other DNA
ctggggcaacataatgagaccccatttctatttaaaacatgtattttaattaactgggtatggtggcatgttcctgaagt

SEQ ID NO: 56402 - DNA, 80 bp, synthetic construct
  source 1..80: mol_type = other DNA
acaacaacaaaaaatagagagagaagagagagagtaagtgtattccaccaagaacatacagtagtatcttttaatatcac

SEQ ID NO: 56403 - DNA, 80 bp, synthetic construct
  source 1..80: mol_type = other DNA
tcacttctattctcccttccttcctaaaagtagccatttttattaatttcttgtttatccttccaatgcagcttttttcc

SEQ ID NO: 56404 - DNA, 80 bp, synthetic construct; identical to SEQ ID NO: 14773
  source 1..80: mol_type = other DNA

SEQ ID NO: 56405 - DNA, 80 bp, synthetic construct
  source 1..80: mol_type = other DNA
gtattgcactgtgaattttccactctaacctagagattcctccgtattagttcaaagagatctttctcattccttttcgt

SEQ ID NO: 56406 - DNA, 80 bp, synthetic construct
  source 1..80: mol_type = other DNA
tcaagtcctctcttctagctactttgaaatatactatatatatatatatatatatatatatatatatatatatatatata

SEQ ID NO: 56407 - DNA, 80 bp, synthetic construct
  source 1..80: mol_type = other DNA
taattttcaattgttacaaataatgacatatcatttttaaaaggcagattactatataataaagatacatacttcacttt

SEQ ID NO: 56408 - DNA, 80 bp, synthetic construct
  source 1..80: mol_type = other DNA
aacccagcaggcggaggttgcagtgagctgagatggcaccactgcactccagcctgggcaacagagcaagactctgtctc

SEQ ID NO: 56409 - DNA, 80 bp, synthetic construct; identical to SEQ ID NO: 14774
  source 1..80: mol_type = other DNA

SEQ ID NO: 56410 - DNA, 80 bp, synthetic construct
  source 1..80: mol_type = other DNA
gctggggctttaaacatttattgagtaaccaccatgtttcaggcattacagtaagaacttgtacctgaagcagatccata

SEQ ID NO: 56411 - DNA, 80 bp, synthetic construct
  source 1..80: mol_type = other DNA
ctccaggtggggtggatgcaaaccacaagatggagccaaattacaagtcataggtagcaacctcctaaaccacaaggagg

SEQ ID NO: 56412 - DNA, 80 bp, synthetic construct
  source 1..80: mol_type = other DNA
gataggtggtttatttagcaaagttggtcaatgaagcttctctgaattggtgccacacgagttgtgaatgggtgatgaat

SEQ ID NO: 56413 - DNA, 80 bp, synthetic construct; identical to SEQ ID NO: 14775
  source 1..80: mol_type = other DNA

SEQ ID NO: 56414 - DNA, 80 bp, synthetic construct
  source 1..80: mol_type = other DNA
agtaggacagtgcagtggaaagaacatgggctctagcatcacacagaccttccaaccacctcctagctgtttgaccttgg

SEQ ID NO: 56415 - DNA, 80 bp, synthetic construct
  source 1..80: mol_type = other DNA
ctttttcctttgtttgtatttaggtttgtcacacaagacaatagcacatgtcaccgccaaggcctttcctcttctggctt

SEQ ID NO: 56416 - DNA, 80 bp, synthetic construct
  source 1..80: mol_type = other DNA
tgcagcagccaaggcaggtggggaggcctcccagggacggggaagttggccgtatggtgcatctttgcagtcctgctccc

SEQ ID NO: 56417 - DNA, 80 bp, synthetic construct; identical to SEQ ID NO: 14776
  source 1..80: mol_type = other DNA

SEQ ID NO: 56418 - DNA, 80 bp, synthetic construct
  source 1..80: mol_type = other DNA
atcttttggaccaagattcaaatccactacacgtgaaaagcattaaggccaggcacattgcatgtgttgggtaaacggta

SEQ ID NO: 56419 - DNA, 80 bp, synthetic construct
  source 1..80: mol_type = other DNA
ataagacacagccttctcttgctttagaggagcagttagtggcaaaggcaaattcatacacagtcaactgacacagggcg

SEQ ID NO: 56420 - DNA, 80 bp, synthetic construct
  source 1..80: mol_type = other DNA
tgcaaaggcagggaggagtaaacatgcgacaacagttttctgtgacttaagcattgatcattttcaggaggagctattat

SEQ ID NO: 56421 - DNA, 80 bp, synthetic construct; identical to SEQ ID NO: 14777
  source 1..80: mol_type = other DNA

SEQ ID NO: 56422 - DNA, 80 bp, synthetic construct
  source 1..80: mol_type = other DNA
gaggaagggaaaaagcagatatcctataagcttctgagagaaaaaaacaacaacgattacgtacaaagtttcatgacaca

SEQ ID NO: 56423 - DNA, 80 bp, synthetic construct
  source 1..80: mol_type = other DNA
cataaaaagttttcctcatatgcactgtttctcaggaagtggaaagaagaggtgcctcattaaaataaggcagaccacaa

SEQ ID NO: 56424 - DNA, 80 bp, synthetic construct
  source 1..80: mol_type = other DNA
aatggagcagacagaaggttctgggagagttatatctggtgataaaattgacagaatacctgatgtgtttgattgtactg

SEQ ID NO: 56425 - DNA, 80 bp, synthetic construct; identical to SEQ ID NO: 14778
  source 1..80: mol_type = other DNA

SEQ ID NO: 56426 - DNA, 80 bp, synthetic construct
  source 1..80: mol_type = other DNA
tattttctgtaagggtgaggatatggtgggagatggggctggaaactggtatttctgtagcaaatattgtagaaatattt

SEQ ID NO: 56427 - DNA, 80 bp, synthetic construct
  source 1..80: mol_type = other DNA
tggaagggagactgggtcaaggacagacagaggatttgatgttcttgttatataggagagatgacatgcttatgatttgt

SEQ ID NO: 56428 - DNA, 80 bp, synthetic construct
  source 1..80: mol_type = other DNA
gactacgtaccttgagactagaaacaaatgtgagtatacacgcaggtgcataaatctaaaagctctggaattactcctag

SEQ ID NO: 56429 - DNA, 80 bp, synthetic construct
  source 1..80: mol_type = other DNA
ttccaatgatgcatcaagttaacgtctaagcaaaagatcagcagagatcagagattgttgggtacacacgtatcttgtga

SEQ ID NO: 56430 - DNA, 80 bp, synthetic construct; identical to SEQ ID NO: 14779
  source 1..80: mol_type = other DNA

SEQ ID NO: 56431 - DNA, 80 bp, synthetic construct
  source 1..80: mol_type = other DNA
tgggaggcctggctaaaatctacccttgggccctgcactcctccccatggctatattgcaaatatcctatactttgcatg

SEQ ID NO: 56432 - DNA, 80 bp, synthetic construct
  source 1..80: mol_type = other DNA
accaactgctcacagttcaaaccctcattttgcctctatttacttgtaccttgattggctgatgccctaacagacccagg

SEQ ID NO: 56433 - DNA, 80 bp, synthetic construct
  source 1..80: mol_type = other DNA
gcctcggctgggcacagtggctaatgcctgtaattccagtactttgggagggaaggtgggtggatcacgaggtcaagaga

SEQ ID NO: 56434 - DNA, 80 bp, synthetic construct; identical to SEQ ID NO: 14780
  source 1..80: mol_type = other DNA

SEQ ID NO: 56435 - DNA, 80 bp, synthetic construct
  source 1..80: mol_type = other DNA
cggcctcagcctccccagtggctgggaatacaggtgcgagccaccatgcctggttaatttttaaatctttctttgtagag

SEQ ID NO: 56436 - DNA, 80 bp, synthetic construct
  source 1..80: mol_type = other DNA
tggtttgaaaaccgtaatctgtattgctcattttggtcctgacataaactatgtggtatggtgatttatctctttgtatg

SEQ ID NO: 56437 - DNA, 80 bp, synthetic construct
  source 1..80: mol_type = other DNA
caagccttgggcctctctttatcatgcatgggactctagggaaaagtagaaaaaggagataacatcatggcaggatacca

SEQ ID NO: 56438 - DNA, 80 bp, synthetic construct; identical to SEQ ID NO: 14781
  source 1..80: mol_type = other DNA

SEQ ID NO: 56439 - DNA, 80 bp, synthetic construct
  source 1..80: mol_type = other DNA
ccaccaaagcatttagtgctgccagccagagctttgggtagagcaagaatgtgtgtgtgtgttgaatgggaagggaagct

SEQ ID NO: 56440 - DNA, 80 bp, synthetic construct
  source 1..80: mol_type = other DNA
tcccacaagtcatttctctcagaaggatcattacctaaaatagcagaaaacatacgatcgaggttgctcaatttcaatat

SEQ ID NO: 56441 - DNA, 80 bp, synthetic construct
  source 1..80: mol_type = other DNA
ccccaccccccagactcccggggcctctgcacctggggacactggacacatatgtgcccatgatgatgaggacggtgccc

SEQ ID NO: 56442 - DNA, 80 bp, synthetic construct; identical to SEQ ID NO: 14782
  source 1..80: mol_type = other DNA

SEQ ID NO: 56443 - DNA, 80 bp, synthetic construct
  source 1..80: mol_type = other DNA
gatgaggatgttgggctggcccagctccacccgagacttggggagcacggtcacccgtggaggcactaggaggaacaggc

SEQ ID NO: 56444 - DNA, 80 bp, synthetic construct
  source 1..80: mol_type = other DNA
ggacgccaggagctcctatatttgactggtccctgggcgggagtccgggtgagaggtgtcattcctcaaggagaggggtg

SEQ ID NO: 56445 - DNA, 80 bp, synthetic construct
  source 1..80: mol_type = other DNA
ggtaccgttgatggctctgctgcggttggagcgctccaccaggatgtccagatgggctttgattgcggcgatgccggcca

SEQ ID NO: 56446 - DNA, 80 bp, synthetic construct; identical to SEQ ID NO: 14783
  source 1..80: mol_type = other DNA

SEQ ID NO: 56447 - DNA, 80 bp, synthetic construct
  source 1..80: mol_type = other DNA
gcatatcaggatgggaagaggagggactgcctaaaatcatgcttggggttccagaatttaaatcttggctgtggtcatct

SEQ ID NO: 56448 - DNA, 80 bp, synthetic construct
  source 1..80: mol_type = other DNA
aaggttagtgacccagagaccaaggggatagggagaggcaactcaaggcattacaaagagcactggacgaggagtcagaa

SEQ ID NO: 56449 - DNA, 80 bp, synthetic construct
  source 1..80: mol_type = other DNA
tgaagttgtttgagcaacagttattgaggaactagcatgcacccagcacaatggggggccagggaaataaaagaaaaaaa

SEQ ID NO: 56450 - DNA, 80 bp, synthetic construct; identical to SEQ ID NO: 14784
  source 1..80: mol_type = other DNA

SEQ ID NO: 56451 - DNA, 80 bp, synthetic construct
  source 1..80: mol_type = other DNA
ccgtaaatctctgctccccgccgcaccctcctcgccctcgcactcacccttggtggcccctgcctcctgcgggctcagga

SEQ ID NO: 56452 - DNA, 80 bp, synthetic construct
  source 1..80: mol_type = other DNA
cttcagccaatcacagaaattctctgagtgaatgtatctgttgctgggtaaagagggaaagagccggggtgagaaggtgg

SEQ ID NO: 56453 - DNA, 80 bp, synthetic construct
  source 1..80: mol_type = other DNA
gtccatctgcgatgcagggaatcctactttcccaagaagtttccgtggacaaattttgagttagaaagtaaaataaactt

SEQ ID NO: 56454 - DNA, 80 bp, synthetic construct; identical to SEQ ID NO: 14785
  source 1..80: mol_type = other DNA

SEQ ID NO: 56455 - DNA, 80 bp, synthetic construct
  source 1..80: mol_type = other DNA
acccttgcctttggcttctggttgggctcggctaataagaggcactgggagaatttagtccagtatatatatttaaaaaa

SEQ ID NO: 56456 - DNA, 80 bp, synthetic construct
  source 1..80: mol_type = other DNA
aaatcatgcgggtctctggttccaaatgagaatcacctggggggttcgttataatacgtgttcctgagtttcctctttac

SEQ ID NO: 56457 - DNA, 80 bp, synthetic construct
  source 1..80: mol_type = other DNA
cttctgacttcaaattaatcaaatgacagctagtaattgatttgcatggcccggtttatggggagccctaatcttagttt

SEQ ID NO: 56458 - DNA, 80 bp, synthetic construct
  source 1..80: mol_type = other DNA
atgagatgaaagacgggaaagccatgaaaaactcatgataaagaatgttgcttctttggttaataacagtcgagtatcgg

SEQ ID NO: 56459 - DNA, 80 bp, synthetic construct; identical to SEQ ID NO: 14786
  source 1..80: mol_type = other DNA

SEQ ID NO: 56460 - DNA, 80 bp, synthetic construct
  source 1..80: mol_type = other DNA
ctataggcatgccccacaattcctggcctatgaatggtatatttaaatctctaactgtgactgtaggtttttcaacttgt

SEQ ID NO: 56461 - DNA, 80 bp, synthetic construct
  source 1..80: mol_type = other DNA
gtgaactgagccttttcccaatttgtcctgagaatctttctgtcctactctgtcttgtctgatagtaataagttctacag

SEQ ID NO: 56462 - DNA, 80 bp, synthetic construct
  source 1..80: mol_type = other DNA
caatctgacgatctctgtcttctaacctatgttcaattcatatggtagtcaaagtgagcaaacttgtttctgcaagagac

SEQ ID NO: 56463 - DNA, 80 bp, synthetic construct
  source 1..80: mol_type = other DNA
cactttgcatctctattattgaaaagcacttcatgaactcctagctttgcaggtaggagagagaacctgggaaaggcaca

SEQ ID NO: 56464 - DNA, 80 bp, synthetic construct; identical to SEQ ID NO: 14787
  source 1..80: mol_type = other DNA

SEQ ID NO: 56465 - DNA, 80 bp, synthetic construct
  source 1..80: mol_type = other DNA
cgggttcaagcgattctcctgcctcagcttcccgagtggctgggactacaggtgcatgccaccatgcttggctatttttt

SEQ ID NO: 56466 - DNA, 80 bp, synthetic construct
  source 1..80: mol_type = other DNA
tcacacccggccaagttttcttttttaatcttcattgcctttttttttttttaagtgttaccgataccttctccatcttc

SEQ ID NO: 56467 - DNA, 80 bp, synthetic construct
  source 1..80: mol_type = other DNA
tttgcatagcaaaccttctaaagtcttgtatgcttgataattttttaaaattataccagcacttttgaataaagtttagc

SEQ ID NO: 56468 - DNA, 80 bp, synthetic construct; identical to SEQ ID NO: 14788
  source 1..80: mol_type = other DNA

SEQ ID NO: 56469 - DNA, 80 bp, synthetic construct
  source 1..80: mol_type = other DNA
gtagtcctccatctttctgttttgtttttcagttgcatctctcccactatttatcccattaatgtggcttttactttgac

SEQ ID NO: 56470 - DNA, 80 bp, synthetic construct
  source 1..80: mol_type = other DNA
cctgtttgctgtttttcttttgaggtgtcggcactccctaaaggtattattttgacccactagtggccatctgtgttggt

SEQ ID NO: 56471 - DNA, 80 bp, synthetic construct
  source 1..80: mol_type = other DNA
tagggcagtccccagctcctcccactccagcaggatttcagcttggattttctcacccacccctcaacagctggacaggc

SEQ ID NO: 56472 - DNA, 80 bp, synthetic construct; identical to SEQ ID NO: 14789
  source 1..80: mol_type = other DNA

SEQ ID NO: 56473 - DNA, 80 bp, synthetic construct
  source 1..80: mol_type = other DNA
cacagattcgacaaaaacttactaaagtgtcctttaaaaatgacacaaatccagttgttctaaattgtctaaaatgctga

SEQ ID NO: 56474 - DNA, 80 bp, synthetic construct
  source 1..80: mol_type = other DNA
tcctcaaggactgtgctgtcctgtgcagtagccacaagccacctgtagctattaagccaaaaaaaactctaagtataaaa

SEQ ID NO: 56475 - DNA, 80 bp, synthetic construct
  source 1..80: mol_type = other DNA
aaaatttgaaattgaattaagaggctcccattatatttctactggacagcgctgctctgggtgctcttggttggctacca

SEQ ID NO: 56476 - DNA, 80 bp, synthetic construct; identical to SEQ ID NO: 14790
  source 1..80: mol_type = other DNA

SEQ ID NO: 56477 - DNA, 80 bp, synthetic construct
  source 1..80: mol_type = other DNA
aatggctcactgctgtcaccagaatgtctgataattcctggacagagaagtgatgcaaatgtgtgcttacgtatggagtt

SEQ ID NO: 56478 - DNA, 80 bp, synthetic construct
  source 1..80: mol_type = other DNA
cccgtctcctgacttctctaaatgccagagttccaacctctgtctcctgggaaattctaagctaaaatcactcttccttt

SEQ ID NO: 56479 - DNA, 80 bp, synthetic construct
  source 1..80: mol_type = other DNA
catcgaaaggcatagatacagcccttcctgtttaaaagaggtatttttgaaaaacttcaaatgtcttctgggaaaggcac

SEQ ID NO: 56480 - DNA, 80 bp, synthetic construct; identical to SEQ ID NO: 14791
  source 1..80: mol_type = other DNA

SEQ ID NO: 56481 - DNA, 80 bp, synthetic construct
  source 1..80: mol_type = other DNA
agttcaagcctctccatgaccatcctgaacaccaatttactgcacgtcaactcactaaaatcaacccatcaactaatcag

SEQ ID NO: 56482 - DNA, 80 bp, synthetic construct
  source 1..80: mol_type = other DNA
ttataagtaatattcgatttgtcagatgttggtgatacagggagaagatgacaatggtgacagagtgtttttcatcttcc

SEQ ID NO: 56483 - DNA, 80 bp, synthetic construct
  source 1..80: mol_type = other DNA
aaaggaaaatatccacaggcagtgtctctttatcagaccagggatatccctagaagatcccgtgagactctagaatgtgt

SEQ ID NO: 56484 - DNA, 80 bp, synthetic construct
  source 1..80: mol_type = other DNA
ctagaatgaatccccagcagagagctctaaggacctagacttttgtaaatttagaaactcccttttctcttaccaatgtc

SEQ ID NO: 56485 - DNA, 80 bp, synthetic construct; identical to SEQ ID NO: 14792
  source 1..80: mol_type = other DNA

SEQ ID NO: 56486 - DNA, 80 bp, synthetic construct
  source 1..80: mol_type = other DNA
gttgtgtaatacacaaaagggaattcttaattctgccctaggtaggagaagctagagagaagatgacgtttgaactgtgc

SEQ ID NO: 56487 - DNA, 80 bp, synthetic construct
  source 1..80: mol_type = other DNA
ggaaacaggctggtgtcaaattgtgaaagccgcagatgtcctgctaagtaatagggttgtgccttatctatgattaatgg

SEQ ID NO: 56488 - DNA, 80 bp, synthetic construct
  source 1..80: mol_type = other DNA
cactccacattcagttctacatagcagcaggaattccttggctcttacttcatcaagaaaattggtcaggcacacccttc

SEQ ID NO: 56489 - DNA, 80 bp, synthetic construct; identical to SEQ ID NO: 14793
  source 1..80: mol_type = other DNA

SEQ ID NO: 56490 - DNA, 80 bp, synthetic construct
  source 1..80: mol_type = other DNA
tgacctcagtgggacagaaattgattgccaaggtcaccaaatctttatctttgtggagttttctgctgctttcatcacag

SEQ ID NO: 56491 - DNA, 80 bp, synthetic construct
  source 1..80: mol_type = other DNA
taaatgcagagtgcctctagggatctgtccccagctaacaatgtctccttgatcaaacattcatttgtatagcttcaatt

SEQ ID NO: 56492 - DNA, 80 bp, synthetic construct
  source 1..80: mol_type = other DNA
attaatggagagcaaaatctaaccattccacctcctctctcctcagggccacaattttattcttctagatatctcttctt

SEQ ID NO: 56493 - DNA, 80 bp, synthetic construct
  source 1..80: mol_type = other DNA
tatgcaatcacaaatgttttacacgtttgacttttctcaaaaccaaaaatcagtttttaaaattgctttttacctatatg

SEQ ID NO: 56494 - DNA, 80 bp, synthetic construct; identical to SEQ ID NO: 14794
  source 1..80: mol_type = other DNA

SEQ ID NO: 56495 - DNA, 80 bp, synthetic construct
  source 1..80: mol_type = other DNA
gttgcatctcctgctctctggaaagtttcatgaggaaatggattgcctctgttcttggtgaaaattaactccattactaa

SEQ ID NO: 56496 - DNA, 80 bp, synthetic construct
  source 1..80: mol_type = other DNA
actgagcccagagggctctgttatcaatcccatggcaattcactgctagtcttctgcaaaagacacatgacccagaggag

SEQ ID NO: 56497 - DNA, 80 bp, synthetic construct
  source 1..80: mol_type = other DNA
gagaccacaccaaagggtcactcctgtcttagcaactgagtaggaagcattgttgccaccaaactgtacaaatctgagaa

SEQ ID NO: 56498 - DNA, 80 bp, synthetic construct
  source 1..80: mol_type = other DNA
tggtgtggtgataatccaaggacatgatagaacttcaggggataaacacacacggattctagagaaaaactgtatacacg

SEQ ID NO: 56499 - DNA, 80 bp, synthetic construct; identical to SEQ ID NO: 14795
  source 1..80: mol_type = other DNA

SEQ ID NO: 56500 - DNA, 80 bp, synthetic construct
  source 1..80: mol_type = other DNA
tgtagacaactgcaatgccaggctcaggatgtgggactttgcaggcagtggagagacagtgatggtttttgaggaggaag

SEQ ID NO: 56501 - DNA, 80 bp, synthetic construct
  source 1..80: mol_type = other DNA
ggagaacaacagggtaagctcagaaatgcccaattcgatacaataattatcacaaaaggagttgcatttgtaacgtacgt

SEQ ID NO: 56502 - DNA, 80 bp, synthetic construct
  source 1..80: mol_type = other DNA
agaagacatagggagatgacaaaactttagaaacaacggaaacaatttagggaatggggtggtcactatgagaggaataa

SEQ ID NO: 56503 - DNA, 80 bp, synthetic construct; identical to SEQ ID NO: 14796
  source 1..80: mol_type = other DNA

SEQ ID NO: 56504 - DNA, 80 bp, synthetic construct
  source 1..80: mol_type = other DNA
acagcaatatccaccaggagtgattttgcctcacaggggatatttgccaatgtctgtaaacatttttgttctcacactag

SEQ ID NO: 56505 - DNA, 80 bp, synthetic construct
  source 1..80: mol_type = other DNA
gccctaaagtgccattgctattgtttgcaagtttaattattccaggagctatacctctgttaaggactgaattttatccc

SEQ ID NO: 56506 - DNA, 80 bp, synthetic construct
  source 1..80: mol_type = other DNA
ccttataaggactggtgtccttataagaagaggaagagacaccaggagagcaaatgcacagaggccctgtgaggacacag

SEQ ID NO: 56507 - DNA, 80 bp, synthetic construct; identical to SEQ ID NO: 14797
  source 1..80: mol_type = other DNA

SEQ ID NO: 56508 - DNA, 80 bp, synthetic construct
  source 1..80: mol_type = other DNA
tggatcacatgggctgcggtggccggtggatcagggaggagaggcgcggggagcttgctgcaactcctcaccagggcagg

SEQ ID NO: 56509 - DNA, 80 bp, synthetic construct
  source 1..80: mol_type = other DNA
aagaaatcatgttcaggacagaacaccagtggtgtgtctatgtaaccatcggatgaggaaattagtatggatcaaccatc

SEQ ID NO: 56510 - DNA, 80 bp, synthetic construct
  source 1..80: mol_type = other DNA
tcaaaggaggggctgcaggtacttgtggggcttcagcactcactatcatgggccaccttgaggctctgctctccacattc

SEQ ID NO: 56511 - DNA, 80 bp, synthetic construct; identical to SEQ ID NO: 14798
  source 1..80: mol_type = other DNA

SEQ ID NO: 56512 - DNA, 80 bp, synthetic construct
  source 1..80: mol_type = other DNA
agattattctggaaacttgacttgctcaggacctggtacacttttcttctctcccatttcttccttttggaataagaatt

SEQ ID NO: 56513 - DNA, 80 bp, synthetic construct
  source 1..80: mol_type = other DNA
taatattcacattgttgtgtgacaactctagaacttttttatatgcaaaatgaaactttatcctcagggaacaactccct

SEQ ID NO: 56514 - DNA, 80 bp, synthetic construct
  source 1..80: mol_type = other DNA
cttctttttttaaggctgaataatattccactgcatatacatatatatatatatacacaccacattttctttattcattt

SEQ ID NO: 56515 - DNA, 80 bp, synthetic construct; identical to SEQ ID NO: 14799
  source 1..80: mol_type = other DNA

SEQ ID NO: 56516 - DNA, 80 bp, synthetic construct
  source 1..80: mol_type = other DNA
tgtatatattatttgaagaattatctgttcaagtcctttgcccatttttaaaccaggttatttgcttttttaattgacaa

SEQ ID NO: 56517 - DNA, 80 bp, synthetic construct
  source 1..80: mol_type = other DNA
ttattaattatattcaccacattgtacactaggcctcttgaacgtattcctcctatttggctgaaattttgtaacctggg

SEQ ID NO: 56518 - DNA, 80 bp, synthetic construct
  source 1..80: mol_type = other DNA
tctgtggcatatccacttaacataatgttcttcaagttcatccatttttgttgtgagtgacaggatcttactctttttta

SEQ ID NO: 56519 - DNA, 80 bp, synthetic construct; identical to SEQ ID NO: 14800
  source 1..80: mol_type = other DNA

SEQ ID NO: 56520 - DNA, 80 bp, synthetic construct
  source 1..80: mol_type = other DNA
tatgtcgagcatttttttcatatgcctgttggccatttgtatgtcaacttttgagaaatgtcttttcaaatcctttgctc

SEQ ID NO: 56521 - DNA, 80 bp, synthetic construct
  source 1..80: mol_type = other DNA
ataatcccatttgtctatttttgcttttgttgcctgtgcttttgggattatatcaaaaaattattgcccaaactaatgtc

SEQ ID NO: 56522 - DNA, 80 bp, synthetic construct
  source 1..80: mol_type = other DNA
gagactatgctttacccattgttggttcttggcacctttgttgaaaatcaattgaccatgaatgtgtggatttgtttctg

SEQ ID NO: 56523 - DNA, 80 bp, synthetic construct; identical to SEQ ID NO: 14801
  source 1..80: mol_type = other DNA

SEQ ID NO: 56524 - DNA, 80 bp, synthetic construct
  source 1..80: mol_type = other DNA
tttacttatttacttatttttagctattgtaaatgagattgttttattggtttcattttcagatagttctttgttagtgt

SEQ ID NO: 56525 - DNA, 80 bp, synthetic construct
  source 1..80: mol_type = other DNA
tcatctacaaacagtgacaatttacatttttcctttccaatttggatgatttttatttcttactcttgcctaattgctgg

SEQ ID NO: 56526 - DNA, 80 bp, synthetic construct
  source 1..80: mol_type = other DNA
tttgttgagagtttttttttaaatcacgaaaggatgttgaattttgtcaaatgctttttcagagtctattgagatattaa

SEQ ID NO: 56527 - DNA, 80 bp, synthetic construct; identical to SEQ ID NO: 14802
  source 1..80: mol_type = other DNA

SEQ ID NO: 56528 - DNA, 80 bp, synthetic construct
  source 1..80: mol_type = other DNA
aagttttcttctatgtttgatagaacttctaggagtttgatacttttagctcttacatttaggtcttttatccattttga

SEQ ID NO: 56529 - DNA, 80 bp, synthetic construct
  source 1..80: mol_type = other DNA
gggtttacttctggaatagacagttgacattggggtactcagaaaacagcaagaatctaagagtgtttgagggtctattc

SEQ ID NO: 56530 - DNA, 80 bp, synthetic construct
  source 1..80: mol_type = other DNA
agacccccctgtaggacttacgtccttcagttatcctcagtttttaatgattcatgtttcatcttagctcctgtaactct

SEQ ID NO: 56531 - DNA, 80 bp, synthetic construct; identical to SEQ ID NO: 14803
  source 1..80: mol_type = other DNA

SEQ ID NO: 56532 - DNA, 80 bp, synthetic construct
  source 1..80: mol_type = other DNA
gactataggcgcccgccaccgcgcccggctaattttttgtatttttagtagagacggggtttcaccgtggtctcgatctc

SEQ ID NO: 56533 - DNA, 80 bp, synthetic construct
  source 1..80: mol_type = other DNA
agcagggacttcctaatgccctgaaatcatgtgataactttttatcttctctaagactgtctggcatggttttctcttct

SEQ ID NO: 56534 - DNA, 80 bp, synthetic construct
  source 1..80: mol_type = other DNA
attttcatattatcttgcctctctcttcctctttccttacaccaaacattgattcatcaaggagtcttaccactttacta

SEQ ID NO: 56535 - DNA, 80 bp, synthetic construct; identical to SEQ ID NO: 14804
  source 1..80: mol_type = other DNA

SEQ ID NO: 56536 - DNA, 80 bp, synthetic construct
  source 1..80: mol_type = other DNA
agacaatgagcttcttttctttttcttaagggatttccacaatcctccactttgtggtattggggacagtggtaatgaca

SEQ ID NO: 56537 - DNA, 80 bp, synthetic construct
  source 1..80: mol_type = other DNA
tctgaaataatccagaaggtggacaatcagacatccacagattaattgatgatttatacttattctccctctctccccac

SEQ ID NO: 56538 - DNA, 80 bp, synthetic construct
  source 1..80: mol_type = other DNA
ctcccctctcctttctgtctctctcagctccaaaaaagaatgatacagagatgcataacactcctctctctcccatctga

SEQ ID NO: 56539 - DNA, 80 bp, synthetic construct; identical to SEQ ID NO: 14805
  source 1..80: mol_type = other DNA

SEQ ID NO: 56540 - DNA, 80 bp, synthetic construct
  source 1..80: mol_type = other DNA
ccttctcaggggcttagtctgccagaaactagtgacactgcctttcacccactttttattggatagagagaaatgttacc

SEQ ID NO: 56541 - DNA, 80 bp, synthetic construct
  source 1..80: mol_type = other DNA
agaatttcccaggaaaagagcttctttgaagtctctacatgcattcagataaatcctttcccctgatattttccctccat

SEQ ID NO: 56542 - DNA, 80 bp, synthetic construct
  source 1..80: mol_type = other DNA
aacacttcctattgctccaggtgccaaagcaggaatgaaaacctgtcccctctgttgaatactcttcttcttcactccta

SEQ ID NO: 56543 - DNA, 80 bp, synthetic construct
  source 1..80: mol_type = other DNA
gtcaggtgcctgcacttggctatctcaacatcaacatcaccccaacacctgttttttcatgcattcaagggagatttttt

SEQ ID NO: 56544 - DNA, 80 bp, synthetic construct; identical to SEQ ID NO: 14806
  source 1..80: mol_type = other DNA

SEQ ID NO: 56545 - DNA, 80 bp, synthetic construct
  source 1..80: mol_type = other DNA
ggtatggagggagacagattgatgattctgtgtatttgggtaaaccaggttcctggctaaaatcacttagtcaaaaatgc

SEQ ID NO: 56546 - DNA, 80 bp, synthetic construct
  source 1..80: mol_type = other DNA
taactataactacctattgcctcatcttagaataaggataaataatatctatgttgaaacactgctgtgagcattagtgc

SEQ ID NO: 56547 - DNA, 80 bp, synthetic construct
  source 1..80: mol_type = other DNA
cgtgcattgaatcaggagacacatgatgttgatttgttctgttatcagtgatgctaattttgactacttgattttagtgg

SEQ ID NO: 56548 - DNA, 80 bp, synthetic construct; identical to SEQ ID NO: 14807
  source 1..80: mol_type = other DNA

SEQ ID NO: 56549 - DNA, 80 bp, synthetic construct
  source 1..80: mol_type = other DNA
tagcaaatgccttcactgaatatttagaagaattcacccaataagatcatctttgcctacagatttctttgtggaaagtt

SEQ ID NO: 56550 - DNA, 80 bp, synthetic construct
  source 1..80: mol_type = other DNA
taattttaatgtctacaggacccataatgacagtacctttttcattcctgatattggaatttcatgccttctgtcttgtt

SEQ ID NO: 56551 - DNA, 80 bp, synthetic construct
  source 1..80: mol_type = other DNA
ggttaaatttgacattctttttctaagtatatgattgattttcagtatttctttctttccaattaattatatgcacttaa

SEQ ID NO: 56552 - DNA, 80 bp, synthetic construct; identical to SEQ ID NO: 14808
  source 1..80: mol_type = other DNA

SEQ ID NO: 56553 - DNA, 80 bp, synthetic construct
  source 1..80: mol_type = other DNA
gattacaggcatgagccaccacacccaactgatattttcaattttttattgtcagggatctgataataattagatttaat

SEQ ID NO: 56554 - DNA, 80 bp, synthetic construct
  source 1..80: mol_type = other DNA
tctttttcattgttttagtagttatgtttttcgagaaatttgtcttttttttttttgacaggttgctatgttgcccaggc

SEQ ID NO: 56555 - DNA, 80 bp, synthetic construct
  source 1..80: mol_type = other DNA
tgtgccaccctgcccagcacaaaatgtgtccattttatctagattatctaattgttggcacgcaattgtacacagtattc

SEQ ID NO: 56556 - DNA, 80 bp, synthetic construct
  source 1..80: mol_type = other DNA
ctatctttttctatttcctagttcatttattcccattctaacattcctttcactagttctggtttgtcttactcatttct

SEQ ID NO: 56557 - DNA, 80 bp, synthetic construct; identical to SEQ ID NO: 14809
  source 1..80: mol_type = other DNA

SEQ ID NO: 56558 - DNA, 80 bp, synthetic construct
  source 1..80: mol_type = other DNA
attacagagtgagccaccgcacccggcctcttttctaatttcttaaagtggaaggttgttactgatttgcaatttttctt

SEQ ID NO: 56559 - DNA, 80 bp, synthetic construct
  source 1..80: mol_type = other DNA
cagctttcttttggttgctctttacatggtgtatcttttcctgccttgtactttcaacctctttgtaactttgtatctaa

SEQ ID NO: 56560 - DNA, 80 bp, synthetic construct
  source 1..80: mol_type = other DNA
ttttttgttcctctattcctctattactgctttttgttgtgttaaatagacattttctatgtatcattttaattcactta

SEQ ID NO: 56561 - DNA, 80 bp, synthetic construct
  source 1..80: mol_type = other DNA
atacaaacactttatttctatacagctctgttccctacccccgtgctgttattgtcatacaaattataccattcttacat

SEQ ID NO: 56562 - DNA, 80 bp, synthetic construct; identical to SEQ ID NO: 14810
  source 1..80: mol_type = other DNA

SEQ ID NO: 56563 - DNA, 80 bp, synthetic construct
  source 1..80: mol_type = other DNA
atcttcctctgtctctcttttttatgtttttacttttttcttttaaatagggatggagtgttgaactcctacactcaagc

SEQ ID NO: 56564 - DNA, 80 bp, synthetic construct
  source 1..80: mol_type = other DNA
atttctctcttaatggtttcaagatatctttgtcttcaactttcaacagattgattacaatgtgtgtaggtgtggatctc

SEQ ID NO: 56565 - DNA, 80 bp, synthetic construct
  source 1..80: mol_type = other DNA
gatggtgttctacaggtctctgaggatctgttcatttttcttttcccatttttcttcttcttcctcaaactggataatca

SEQ ID NO: 56566 - DNA, 80 bp, synthetic construct; identical to SEQ ID NO: 14811
  source 1..80: mol_type = other DNA

SEQ ID NO: 56567 - DNA, 80 bp, synthetic construct
  source 1..80: mol_type = other DNA
tttgttgaaaactagatattttgtgtaatataatgtggcaacccagataatgagattcttccctcgctttcccttctagg

SEQ ID NO: 56568 - DNA, 80 bp, synthetic construct
  source 1..80: mol_type = other DNA
aatgtttgaacaaaggtttcctaaaatgcctggaataaacatatctcctagtctttcctggggagctttttctttgtttt

SEQ ID NO: 56569 - DNA, 80 bp, synthetic construct
  source 1..80: mol_type = other DNA
aggtccttgtgctgtgtcaaaacatggcagagaaacaaaaggagaacgaggtatatgtgaacaggacaaaacaagagagg

SEQ ID NO: 56570 - DNA, 80 bp, synthetic construct
  source 1..80: mol_type = other DNA
caccagattgggaaccaagcctcaaaataagttttgatgaggacaagccatattcaaaccacagcaggttctgtgtgcat

SEQ ID NO: 56571 - DNA, 80 bp, synthetic construct; identical to SEQ ID NO: 14812
  source 1..80: mol_type = other DNA

SEQ ID NO: 56572 - DNA, 80 bp, synthetic construct
  source 1..80: mol_type = other DNA
catggaaaaggatttttgcaccgggcaagttcccaatcaggtcaaatgagaactactttgcaaattgggtattccaggaa

SEQ ID NO: 56573 - DNA, 80 bp, synthetic construct
  source 1..80: mol_type = other DNA
agtctactgcagaacccgagaggacagaatgggaattgtacaagttaaaatgtcacaaaactgttcttattgagattgca

SEQ ID NO: 56574 - DNA, 80 bp, synthetic construct
  source 1..80: mol_type = other DNA
attgacccatctataggagtttttaaaaatttatatcatcattttttagttctagaatttctattaattcttttctatac

SEQ ID NO: 56575 - DNA, 80 bp, synthetic construct; identical to SEQ ID NO: 14813
  source 1..80: mol_type = other DNA

SEQ ID NO: 56576 - DNA, 80 bp, synthetic construct
  source 1..80: mol_type = other DNA
aatgttggctcctctcttgttatcttcttttcatgatcttgtcttctcaagctgtcatcaccttgagagttttatgattc

SEQ ID NO: 56577 - DNA, 80 bp, synthetic construct
  source 1..80: mol_type = other DNA
ggactataggcatgggccaccatgcccagttgattttttatttttatagagtctgggtcttgctatgttgcccaagctgg

SEQ ID NO: 56578 - DNA, 80 bp, synthetic construct
  source 1..80: mol_type = other DNA
agccaaaaagaggaaggcaatctacggtattgttttttattgacaactggggatagaattggaaactcaggtctttctac

SEQ ID NO: 56579 - DNA, 80 bp, synthetic construct; identical to SEQ ID NO: 14814
  source 1..80: mol_type = other DNA

SEQ ID NO: 56580 - DNA, 80 bp, synthetic construct
  source 1..80: mol_type = other DNA
tcaatgtcagtatttcaagtaataccagcaagaaattaataataacctgtatagatgtgcttgggcagattcatttgagg

SEQ ID NO: 56581 - DNA, 80 bp, synthetic construct
  source 1..80: mol_type = other DNA
agagaggaggtaaacaatatcaaatgttggcaagtaacaatatcttattatggctttacattgaagaatcaaggcctata

SEQ ID NO: 56582 - DNA, 80 bp, synthetic construct
  source 1..80: mol_type = other DNA
ttgtgtatccccaacttaactttcccttatttgaatctctgaaatatctatggtcactctattgccgcctaacaaggggc

SEQ ID NO: 56583 - DNA, 80 bp, synthetic construct; identical to SEQ ID NO: 14815
  source 1..80: mol_type = other DNA

SEQ ID NO: 56584 - DNA, 80 bp, synthetic construct
  source 1..80: mol_type = other DNA
tcattatgctttgtttctgtaaaataaaaactaaactacatgtttgggttgggggctttggtttttgtttttagttctaa

SEQ ID NO: 56585 - DNA, 80 bp, synthetic construct
  source 1..80: mol_type = other DNA
ttttatgcattgagtacatttcaagtcctctcttctagtttttttgaaaaatactacacattgttgttaactatagtcac

SEQ ID NO: 56586 - DNA, 80 bp, synthetic construct
  source 1..80: mol_type = other DNA
tgagaacatgtgatatttgtttttttgtgcctggcttatttcacttaacattatgacgtccacttccatccatgttactg

SEQ ID NO: 56587 - DNA, 80 bp, synthetic construct; identical to SEQ ID NO: 14816
  source 1..80: mol_type = other DNA

SEQ ID NO: 56588 - DNA, 80 bp, synthetic construct
  source 1..80: mol_type = other DNA
ggggtaaaatgatatctcattgtggttgtttgttttgcttttgtagtgatgggatctcactactttgcttaggctggtct

SEQ ID NO: 56589 - DNA, 80 bp, synthetic construct
  source 1..80: mol_type = other DNA
gtcttcttttctttctcttgctctctctcatttttcttttctcaatgaagagaacaaatgcctgtcttcttttgggaaat

SEQ ID NO: 56590 - DNA, 80 bp, synthetic construct
  source 1..80: mol_type = other DNA
cctcagtccttcagctgggactacaggctcatgtcaccataccaggctatttggttctttttaattttagtaagagactg

SEQ ID NO: 56591 - DNA, 80 bp, synthetic construct; identical to SEQ ID NO: 14817
  source 1..80: mol_type = other DNA

SEQ ID NO: 56592 - DNA, 80 bp, synthetic construct
  source 1..80: mol_type = other DNA
caggtattacatttaagtctttaatctatcttgagttgatttttgtatatggtgagaagtaggggtccagtttcattctt

SEQ ID NO: 56593 - DNA, 80 bp, synthetic construct
  source 1..80: mol_type = other DNA
atttctataggttattgggaaacaggtggtgtttggttacatgagtgagttctttagtgaagatttttgagactttggtg

SEQ ID NO: 56594 - DNA, 80 bp, synthetic construct
  source 1..80: mol_type = other DNA
gcctggttttcccttcctgagttactgcacttagaataatagtctccaatctcaaacaggtcactgcaaatgccattaaa

SEQ ID NO: 56595 - DNA, 80 bp, synthetic construct; identical to SEQ ID NO: 14818
  source 1..80: mol_type = other DNA

SEQ ID NO: 56596 - DNA, 80 bp, synthetic construct
  source 1..80: mol_type = other DNA
tataatgacttcttttcctctgggtagatacccagtagtgggattgctggatcaaatggtagttctacttttaggactct

SEQ ID NO: 56597 - DNA, 80 bp, synthetic construct
  source 1..80: mol_type = other DNA
tggttttgatttgcattttcctgattattagtgatgctgagcaatttttcttatgtttgttggccatttgtatgtctttt

SEQ ID NO: 56598 - DNA, 80 bp, synthetic construct
  source 1..80: mol_type = other DNA
tctgctgactgttccttttgccgtgcaaaagctctttagtttaattaaggtctcagctatttatctttgttcttattgca

SEQ ID NO: 56599 - DNA, 80 bp, synthetic construct; identical to SEQ ID NO: 14819
  source 1..80: mol_type = other DNA

SEQ ID NO: 56600 - DNA, 80 bp, synthetic construct
  source 1..80: mol_type = other DNA
ctccagatctgttctttttggttagtcttgctttggctatgtgggctcttttttggttccatatgaaatttagaattgtt

SEQ ID NO: 56601 - DNA, 80 bp, synthetic construct
  source 1..80: mol_type = other DNA
cagtgttttgtagtattcctggtagagatttttagcctccttggttaagtatattccaagcattttttaaatttattttc

SEQ ID NO: 56602 - DNA, 80 bp, synthetic construct; identical to SEQ ID NO: 14820
  source 1..80: mol_type = other DNA

SEQ ID NO: 56603 - DNA, 80 bp, synthetic construct
  source 1..80: mol_type = other DNA
tatacatgtgccatgctggtgtgctgtacccattaacttgtcatttagcattaggtatatctcctaatgctaaccctccc

SEQ ID NO: 56604 - DNA, 80 bp, synthetic construct
  source 1..80: mol_type = other DNA
tgtccctacaaaggacatgaactcatcattttttatggctgcatagtattccatggtgtatatgtgccacattttcttaa

SEQ ID NO: 56605 - DNA, 80 bp, synthetic construct
  source 1..80: mol_type = other DNA
tagttctagatccctgaggaattgccacactgacttccacaatggttgaactagtttacagtcccaccaacagtgtaaaa

SEQ ID NO: 56606 - DNA, 80 bp, synthetic construct; identical to SEQ ID NO: 14821
  source 1..80: mol_type = other DNA

SEQ ID NO: 56607 - DNA, 80 bp, synthetic construct
  source 1..80: mol_type = other DNA
ttttgtatttaactgtgtttatgtgatgtatcacatttattgacttgcatatgttaaaccatccctgcatccctggtatg

SEQ ID NO: 56608 - DNA, 80 bp, synthetic construct
  source 1..80: mol_type = other DNA
gcttcatagaatgaattagggaaaattctctctttctctatctttttgaatagtttcagtaagattgataccaattcttc

SEQ ID NO: 56609 - DNA, 80 bp, synthetic construct
  source 1..80: mol_type = other DNA
aatttgcccatctcctctagactttctagtttgtctgcataaaggtgttcatagtagccttcaatgatcttttgtatttc

SEQ ID NO: 56610 - DNA, 80 bp, synthetic construct; identical to SEQ ID NO: 14822
  source 1..80: mol_type = other DNA

SEQ ID NO: 56611 - DNA, 80 bp, synthetic construct
  source 1..80: mol_type = other DNA
tgttttgtttttttgagagtttcgctcttgttgcccaggctggagtacagtggcacaatcttggctcactgcaaccacca

SEQ ID NO: 56612 - DNA, 80 bp, synthetic construct
  source 1..80: mol_type = other DNA
acctcggcctcccaaagtgccaggattacaggtgtgagccaccgtgcccggccttcctagagtttctgataaattgtgtc

SEQ ID NO: 56613 - DNA, 80 bp, synthetic construct
  source 1..80: mol_type = other DNA
agggtacatcatataattttgattttcttaaacttattgagacttgttttgtggcctaccataacgtctgtcttggagga

SEQ ID NO: 56614 - DNA, 80 bp, synthetic construct; identical to SEQ ID NO: 14823
  source 1..80: mol_type = other DNA

SEQ ID NO: 56615 - DNA, 80 bp, synthetic construct
  source 1..80: mol_type = other DNA
aattgcccagtctcagttatgtctttatcggcagtgtgaaaacagaataatacagtaaattggtaccggtagagtggggc

SEQ ID NO: 56616 - DNA, 80 bp, synthetic construct
  source 1..80: mol_type = other DNA
gctgagatggtttcagatggagatgaggaacttgttgggaactgaagcaaaggtgactcttgttatgttttagcaaagac

SEQ ID NO: 56617 - DNA, 80 bp, synthetic construct
  source 1..80: mol_type = other DNA
aagtttgaaaaatttgcagcctgacaatgcgatagaaaataaaatcccattttctgaggagaaattcaagccagctgcag

SEQ ID NO: 56618 - DNA, 80 bp, synthetic construct; identical to SEQ ID NO: 14824
  source 1..80: mol_type = other DNA

SEQ ID NO: 56619 - DNA, 80 bp, synthetic construct
  source 1..80: mol_type = other DNA
catgattctgtcccctattctgttgtattctattggtctatgtgtctgttttttataccagtactctactcttttggtta

SEQ ID NO: 56620 - DNA, 80 bp, synthetic construct
  source 1..80: mol_type = other DNA
agggatcacattaaatctgtagattgctttgggccatatggtcattttaatgatattaattcttctgatccattagcatg

SEQ ID NO: 56621 - DNA, 80 bp, synthetic construct
  source 1..80: mol_type = other DNA
tcagctatttcattgttggtgaatagaaatgctacttatttctgcatattaattttgtatcctgccaagtctactgaatt

SEQ ID NO: 56622 - DNA, 80 bp, synthetic construct; identical to SEQ ID NO: 14825
  source 1..80: mol_type = other DNA

SEQ ID NO: 56623 - DNA, 80 bp, synthetic construct
  source 1..80: mol_type = other DNA
tgttgatgtgatgtatcacattcattgatttgtgtatgttgaaatatccttgcatccttgctgtaaatcctacttgatca

SEQ ID NO: 56624 - DNA, 80 bp, synthetic construct
  source 1..80: mol_type = other DNA
tttgggagaattccctcttcttcaactttttggaccagttggaggaaaatcggtggtggttctctgaaagtttggtggaa

SEQ ID NO: 56625 - DNA, 80 bp, synthetic construct
  source 1..80: mol_type = other DNA
tttctccagtttgttaccatatatttgttcataatggtttctgattatcttttgtatttatgtgggatctgttgtaatag

SEQ ID NO: 56626 - DNA, 80 bp, synthetic construct; identical to SEQ ID NO: 14826
  source 1..80: mol_type = other DNA

SEQ ID NO: 56627 - DNA, 80 bp, synthetic construct
  source 1..80: mol_type = other DNA
gtcggcaaacaggtcaattgccctctagtggtgtgaacaaatgcgagctttgctggttgatcagggccatagatgcaact

SEQ ID NO: 56628 - DNA, 80 bp, synthetic construct
  source 1..80: mol_type = other DNA
gagattgatgaaccccctgaaaatgaaggtgaaaaaggaactgcgcagtcagtgagtaatcagtaagtcattggtacttg

SEQ ID NO: 56629 - DNA, 80 bp, synthetic construct
  source 1..80: mol_type = other DNA
agagcctcagtttcacaggtttaattaaggaacctaatgcaaactgttgtatcccataacccatggttcccccaagaagg

SEQ ID NO: 56630 - DNA, 80 bp, synthetic construct
  source 1..80: mol_type = other DNA
gcaccatcatgtattttaccacccgcaagttcctcagccctgatatcaccaggccaaaataacaaagaggaaatggaggt

SEQ ID NO: 56631 - DNA, 80 bp, synthetic construct; identical to SEQ ID NO: 14827
  source 1..80: mol_type = other DNA

SEQ ID NO: 56632 - DNA, 80 bp, synthetic construct
  source 1..80: mol_type = other DNA
ggaaggcagaatatgatgagctgtgtgaacaacaagctaaccagaatcaggtgaccgggcaagacctaacagctgctatg

SEQ ID NO: 56633 - DNA, 80 bp, synthetic construct
  source 1..80: mol_type = other DNA
ccatttgttgagtttttcaattggttaacccaggcaattaagagacaaattagtcacgcccaggctgctgatatcttatt

SEQ ID NO: 56634 - DNA, 80 bp, synthetic construct
  source 1..80: mol_type = other DNA
aagtgaaaagggagagaagccaaagttgttttctatgtggagagccagatcatatgaagagggaatgcccccataataga

SEQ ID NO: 56635 - DNA, 80 bp, synthetic construct; identical to SEQ ID NO: 14828
  source 1..80: mol_type = other DNA

SEQ ID NO: 56636 - DNA, 80 bp, synthetic construct
  source 1..80: mol_type = other DNA
tggggtaattggtagtgattaccaaggtgagatattggttatgatggaatgtaaaggtctgaatattcttccccctggat

SEQ ID NO: 56637 - DNA, 80 bp, synthetic construct
  source 1..80: mol_type = other DNA
tgatcagagacccatgattatcttaaaaattggaaataataattttactggcttattggacacaggggtggacgtttcaa

SEQ ID NO: 56638 - DNA, 80 bp, synthetic construct
  source 1..80: mol_type = other DNA
cagaaggaagaaaggcagttatacaacccgtaagcatgcgcatccctgttaatctttggggacaggatttattagcccaa

SEQ ID NO: 56639 - DNA, 80 bp, synthetic construct
  source 1..80: mol_type = other DNA
agaaattacaaaaagcctgtgaattagttgaagagcaattaaaagctgggcatgtagaaccatctattagtccttggaat

SEQ ID NO: 56640 - DNA, 80 bp, synthetic construct; identical to SEQ ID NO: 14829
  source 1..80: mol_type = other DNA

SEQ ID NO: 56641 - DNA, 80 bp, synthetic construct
  source 1..80: mol_type = other DNA
gattatttgttttatgaatattttaccagcaaccccaacagagccaatacttttaaatttatatacctctgtcataaaga

SEQ ID NO: 56642 - DNA, 80 bp, synthetic construct
  source 1..80: mol_type = other DNA
actagcaacttacattccttaaatgattatcagaaattactaggtgatatcaactggctctgccccactttaggcattcc

SEQ ID NO: 56643 - DNA, 80 bp, synthetic construct
  source 1..80: mol_type = other DNA
ttgtttattttccccaccaaacactccccttcaggattaataggacagatgaccccaagactgcactttctagaatggat

SEQ ID NO: 56644 - DNA, 80 bp, synthetic construct; identical to SEQ ID NO: 14830
  source 1..80: mol_type = other DNA

SEQ ID NO: 56645 - DNA, 80 bp, synthetic construct
  source 1..80: mol_type = other DNA
ttactagcattcagagaggtgagatcggggccctgatattggccttggaaactttttctactcagccatcaatatagtta

SEQ ID NO: 56646 - DNA, 80 bp, synthetic construct
  source 1..80: mol_type = other DNA
cacatcctacttttattacacacattcgagcccacagctctctgcctggcccattggcttatggcaatgatcaagcagac

SEQ ID NO: 56647 - DNA, 80 bp, synthetic construct
  source 1..80: mol_type = other DNA
cttcaaaagctgttaaccctagaggattagaacctaatcagttatggcaaacagaagttacatccctgaatttggaaaac

SEQ ID NO: 56648 - DNA, 80 bp, synthetic construct; identical to SEQ ID NO: 14831
  source 1..80: mol_type = other DNA

SEQ ID NO: 56649 - DNA, 80 bp, synthetic construct
  source 1..80: mol_type = other DNA
ttttgctaaaacctctcaagacataaaacctgcagttttatggaaagatgtaagcagtaatgtatggtgtggtccaaatg

SEQ ID NO: 56650 - DNA, 80 bp, synthetic construct
  source 1..80: mol_type = other DNA
tgcagcttccgtggatgacacaaaccctagacattactggggaatgctgaagaggacaactcgggaggctgaatgaaccc

SEQ ID NO: 56651 - DNA, 80 bp, synthetic construct
  source 1..80: mol_type = other DNA
tttctttcaccctgtcacctaggcagacactcccttcccaacttttaataacataactgcttggctaggagggatagatt

SEQ ID NO: 56652 - DNA, 80 bp, synthetic construct; identical to SEQ ID NO: 14832
  source 1..80: mol_type = other DNA

SEQ ID NO: 56653 - DNA, 80 bp, synthetic construct
  source 1..80: mol_type = other DNA
ggtgtcaatcacagtttcgtagcctcatcacgttcccctatgatttgggccaataggggggatgggttatcccatacccc

SEQ ID NO: 56654 - DNA, 80 bp, synthetic construct
  source 1..80: mol_type = other DNA
tattttccttatgggaactgatatttccattacaccccaaaactcctcatttgtgacccaggtgcagaaacaggcttggt

SEQ ID NO: 56655 - DNA, 80 bp, synthetic construct
  source 1..80: mol_type = other DNA
gacccaaaagatacataggcacacttacagcctttatagtctcagccacagtcatcctagcaactgctagtgtggctgta

SEQ ID NO: 56656 - DNA, 80 bp, synthetic construct; identical to SEQ ID NO: 14833
  source 1..80: mol_type = other DNA

SEQ ID NO: 56657 - DNA, 80 bp, synthetic construct
  source 1..80: mol_type = other DNA
aagatcatcactcctggttagacccccgctcctggggttcactctttgactggaaaagaatattgctaattattctcatg

SEQ ID NO: 56658 - DNA, 80 bp, synthetic construct
  source 1..80: mol_type = other DNA
atatcttagttttccaaattcagggatgtaacttctgtttgccataactgattaggttctaatcctctagggttaacacc

SEQ ID NO: 56659 - DNA, 80 bp, synthetic construct
  source 1..80: mol_type = other DNA
aagccaaatttcacagtggatctaacaaagtagctaatgggtactatgcttctgagaacctgaacaggcatctgagagct

SEQ ID NO: 56660 - DNA, 80 bp, synthetic construct; identical to SEQ ID NO: 14834
  source 1..80: mol_type = other DNA

SEQ ID NO: 56661 - DNA, 80 bp, synthetic construct
  source 1..80: mol_type = other DNA
ccacttcaaccctcagttctctcacttctatgtccacgtgacactctgatacattttcccactatgaaaagaactgttct

SEQ ID NO: 56662 - DNA, 80 bp, synthetic construct
  source 1..80: mol_type = other DNA
tcattaagcagaagtgataattcttgtcatcacagctttctccaaaccttctccatcggcattttactctcactcttaga

SEQ ID NO: 56663 - DNA, 80 bp, synthetic construct
  source 1..80: mol_type = other DNA
gagaggaaatagagacaaatagtttttatgggtgtaatacacagcctccactgtcccacaataagagcaattgagcttaa

SEQ ID NO: 56664 - DNA, 80 bp, synthetic construct; identical to SEQ ID NO: 14835
  source 1..80: mol_type = other DNA

SEQ ID NO: 56665 - DNA, 80 bp, synthetic construct
  source 1..80: mol_type = other DNA
cttcaccaaaccaaacttgaccagattctttaatggctccaaaatcacaaccctttgaactattttactcctgttttcca

SEQ ID NO: 56666 - DNA, 80 bp, synthetic construct
  source 1..80: mol_type = other DNA
gtcccttgacaggtatatcaaactatttggtcttatccagttggtggtcaaccagatagttataagtgagatggagagac

SEQ ID NO: 56667 - DNA, 80 bp, synthetic construct
  source 1..80: mol_type = other DNA
acactcattctcctgcagatctcagtcaccctcatggcatcaatcatgatgccacagaaaaacccattagtgtatagtct

SEQ ID NO: 56668 - DNA, 80 bp, synthetic construct; identical to SEQ ID NO: 14836
  source 1..80: mol_type = other DNA

SEQ ID NO: 56669 - DNA, 80 bp, synthetic construct
  source 1..80: mol_type = other DNA
tgagattagggagtggtgatgactcttaaggagcatgctgccttcaagcatctgtttaacaaagcacatcttgcaccacc

SEQ ID NO: 56670 - DNA, 80 bp, synthetic construct
  source 1..80: mol_type = other DNA
caaccatccgatttctcaatcttttccccacctttcccccgtttctattctacaaaaccgccattgtcatcacggcccgt

SEQ ID NO: 56671 - DNA, 80 bp, synthetic construct
  source 1..80: mol_type = other DNA
ggcggctggcggggcagggggctgaccccccacctccctcccggacggggcggctggctgggcagaggggctcttcactt

SEQ ID NO: 56672 - DNA, 80 bp, synthetic construct
  source 1..80: mol_type = other DNA
gaggggctcctcacttcccagtaggggcggccgggcagaggcgcccctcacctgccggacggggcggctggccgggcggg

SEQ ID NO: 56673 - DNA, 80 bp, synthetic construct; identical to SEQ ID NO: 14837
  source 1..80: mol_type = other DNA

SEQ ID NO: 56674 - DNA, 80 bp, synthetic construct
  source 1..80: mol_type = other DNA
gctcttcacttcccagacggggtggcggccgggcagaggctgcagtctcggcactttgggaggccaaggcaggctgctgg

SEQ ID NO: 56675 - DNA, 80 bp, synthetic construct
  source 1..80: mol_type = other DNA
cagcgaatccccatctccaccaaaaaaatacgaaaaccagtcaggtgtggcggcgcgcgcctgcaatcgcaggcactcgg

SEQ ID NO: 56676 - DNA, 80 bp, synthetic construct; identical to SEQ ID NO: 14838
  source 1..80: mol_type = other DNA

SEQ ID NO: 56677 - DNA, 80 bp, synthetic construct
  source 1..80: mol_type = other DNA
ggacttttaaaattagtatttcattacaaatgtctcagcattggtcaatttttgccaggaccattattgatcaagcaaat

SEQ ID NO: 56678 - DNA, 80 bp, synthetic construct
  source 1..80: mol_type = other DNA
ccactttcacattagataatttaatagttttatggagaaagtaaaatgcccgcccccctcccccacccaaaattgaaaat

SEQ ID NO: 56679 - DNA, 80 bp, synthetic construct
  source 1..80: mol_type = other DNA
taatttttctttgtattctgttaagatgtggaatcacattgattttttgcatgttaaacatgccttccattcctggcata

SEQ ID NO: 56680 - DNA, 80 bp, synthetic construct
  source 1..80: mol_type = other DNA
tgtcattgtttgatgttagtatattggacttgtaaattattgggatgtgttttcttctgctcttttgttgaaagagtttg

SEQ ID NO: 56681 - DNA, 80 bp, synthetic construct; identical to SEQ ID NO: 14839
  source 1..80: mol_type = other DNA

SEQ ID NO: 56682 - DNA, 80 bp, synthetic construct
  source 1..80: mol_type = other DNA
gggagccctcagaacccagaaagattcagaaagctctgtccagcaacatgtgaaggcagtgtttatagataaaaacagga

SEQ ID NO: 56683 - DNA, 80 bp, synthetic construct
  source 1..80: mol_type = other DNA
tgagactcagctatttattacaacactcttaagttaggctgtagtttgtttgcataacgcagttatgttaagttgggtta

SEQ ID NO: 56684 - DNA, 80 bp, synthetic construct
  source 1..80: mol_type = other DNA
cccacttccatttctgatattggggatttgagtcttatctctttttcttgatccatctacctagagattcatgaatgtat

SEQ ID NO: 56685 - DNA, 80 bp, synthetic construct; identical to SEQ ID NO: 14840
  source 1..80: mol_type = other DNA

SEQ ID NO: 56686 - DNA, 80 bp, synthetic construct
  source 1..80: mol_type = other DNA
ttctaatttaatgctattgtggtccgagaatgtattctgtatgatttcaatagagacatttatttatttagacatttatt

SEQ ID NO: 56687 - DNA, 80 bp, synthetic construct
  source 1..80: mol_type = other DNA
ggttcattgataatgttatttaaatctatcatgtcctcatgaagttttttcctaaatattttattgtttactgagtgcta

SEQ ID NO: 56688 - DNA, 80 bp, synthetic construct
  source 1..80: mol_type = other DNA
ctccttggtaatatttctgagtcttatatttctgatattaacacagccaccaatacttccatggttggcattattttcgt

SEQ ID NO: 56689 - DNA, 80 bp, synthetic construct; identical to SEQ ID NO: 14841
  source 1..80: mol_type = other DNA

SEQ ID NO: 56690 - DNA, 80 bp, synthetic construct
  source 1..80: mol_type = other DNA
tttttacctgtctttgccttcatatttaaagagggcattatgtagagagcatgaagttggcctgtagatttttttgtgca

SEQ ID NO: 56691 - DNA, 80 bp, synthetic construct
  source 1..80: mol_type = other DNA
agtgttctattttatcttctccattggcctcttggctatacctctttttttttcaatagttatcaggagcttaaaatatt

SEQ ID NO: 56692 - DNA, 80 bp, synthetic construct
  source 1..80: mol_type = other DNA
ctgggtatgttataaacccccaaataatttttactttaaacaattccttttttaacttaaaaaaaactagagaacatgtt

SEQ ID NO: 56693 - DNA, 80 bp, synthetic construct; identical to SEQ ID NO: 14842
  source 1..80: mol_type = other DNA

SEQ ID NO: 56694 - DNA, 80 bp, synthetic construct
  source 1..80: mol_type = other DNA
ctacatccaagaaaatcttcatccaagtaaaatttcccccaaatatcctttctctaccccaccctatcctgtagttaggg

SEQ ID NO: 56695 - DNA, 80 bp, synthetic construct
  source 1..80: mol_type = other DNA
ccccgctctgaaatactgaagtatttattggtcttagggtattctcgggaaggtgacagtgaggggttcttcaaaggaga

SEQ ID NO: 56696 - DNA, 80 bp, synthetic construct
  source 1..80: mol_type = other DNA
agttttcacatgaagtgagaagaaaagctgagatggagtttgtagggcagctggagttcagatctctcctaagtcctctt

SEQ ID NO: 56697 - DNA, 80 bp, synthetic construct; identical to SEQ ID NO: 14843
  source 1..80: mol_type = other DNA

SEQ ID NO: 56698 - DNA, 80 bp, synthetic construct
  source 1..80: mol_type = other DNA
tgctcacattgtgtatactgctctttgaaaggatttcaaaaaccaaggtaaattttctaaaatgacctctgttgaacatc

SEQ ID NO: 56699 - DNA, 80 bp, synthetic construct
  source 1..80: mol_type = other DNA
agatatttcattaaaatatgatttattactgagttcttttggtatcccccaaattttgcacctaagccaggtgcatcccc

SEQ ID NO: 56700 - DNA, 80 bp, synthetic construct
  source 1..80: mol_type = other DNA
tacaatgtcatagtaatcaaaatactaggacactggcacaagaagagacaaacagaacagtggaacaagatggaactcag

SEQ ID NO: 56701 - DNA, 80 bp, synthetic construct; identical to SEQ ID NO: 14844
  source 1..80: mol_type = other DNA

SEQ ID NO: 56702 - DNA, 80 bp, synthetic construct
  source 1..80: mol_type = other DNA
aaacatttgcaatgcctaaaactgacaagggactactagcaggactatataaggatcacctgcaaatcaataagaaaatg

SEQ ID NO: 56703 - DNA, 80 bp, synthetic construct
  source 1..80: mol_type = other DNA
aaaagttagaaaactggataatgtccagtgttgaagtccatttaggagttgcaggacaattagagtactgacaaaggaag

SEQ ID NO: 56704 - DNA, 80 bp, synthetic construct
  source 1..80: mol_type = other DNA
ttgcttgcaatagtagagaaccaggaatgatccaggtatcccaggagcaatgtagatatgtggattaatatgatttggat

SEQ ID NO: 56705 - DNA, 80 bp, synthetic construct; identical to SEQ ID NO: 14845
  source 1..80: mol_type = other DNA

SEQ ID NO: 56706 - DNA, 80 bp, synthetic construct
  source 1..80: mol_type = other DNA
tggacatataaagtaaaatactatggaagatttggaagaaacaaactggatgtacaaaattagatctataatttaatgcc

SEQ ID NO: 56707 - DNA, 80 bp, synthetic construct
  source 1..80: mol_type = other DNA
taaatcaagggagagagagagagctcggaggcaccaatgatgatcatataatgaactgagaagttcttaaccttttgtac

SEQ ID NO: 56708 - DNA, 80 bp, synthetic construct
  source 1..80: mol_type = other DNA
ttttttgtgtgaacattgccatggaatgagtccaagtagagacagtaagtagttacaggcacccaccacactgtgttgta

SEQ ID NO: 56709 - DNA, 80 bp, synthetic construct; identical to SEQ ID NO: 14846
  source 1..80: mol_type = other DNA

SEQ ID NO: 56710 - DNA, 80 bp, synthetic construct
  source 1..80: mol_type = other DNA
ttatcagattgaatttttcctcccttccttacattctacaaatcctagggcctcctctttacattcccacctttacagta

SEQ ID NO: 56711 - DNA, 80 bp, synthetic construct
  source 1..80: mol_type = other DNA
ggggaagaatgaagagatagggtcaggaggtgcagtgagggtggtgatggcctgggatggttgtgggaattgaaggttat

SEQ ID NO: 56712 - DNA, 80 bp, synthetic construct
  source 1..80: mol_type = other DNA
ccccagtgctccaccctgcagtcatagaagtcctctgctgagggcacaaaggtcaggtaatggaacttgtggaagctgta

SEQ ID NO: 56713 - DNA, 80 bp, synthetic construct; identical to SEQ ID NO: 14847
  source 1..80: mol_type = other DNA

SEQ ID NO: 56714 - DNA, 80 bp, synthetic construct
  source 1..80: mol_type = other DNA
ggaagaggatcacacagcagggggcacttaggcttcctagtctgagggtggcagagaggccctctcatcccttccagttg

SEQ ID NO: 56715 - DNA, 80 bp, synthetic construct
  source 1..80: mol_type = other DNA
gacggtctccttcttgtccagatccacatagaacatctcatcttcatcaaattcaaacataaactcccctgttggtctat

SEQ ID NO: 56716 - DNA, 80 bp, synthetic construct
  source 1..80: mol_type = other DNA
aggacatatggggaagaagaaggagcaacaccataaaggaaataatacagagcagatgagcagttataaaaagaaaggag

SEQ ID NO: 56717 - DNA, 80 bp, synthetic construct; identical to SEQ ID NO: 14848
  source 1..80: mol_type = other DNA

SEQ ID NO: 56718 - DNA, 80 bp, synthetic construct
  source 1..80: mol_type = other DNA
aaaggtagaaaaaaatacaaaattgagaggaagaagaaaatatccttcaaattttagggctcttgacagttttaaagttt

SEQ ID NO: 56719 - DNA, 80 bp, synthetic construct
  source 1..80: mol_type = other DNA
aggagtacatgtgcaggtttgttgtataggtaaactcatgacttgggggtttagtgtacagattatttcatcacacaggt

SEQ ID NO: 56720 - DNA, 80 bp, synthetic construct
  source 1..80: mol_type = other DNA
aactattatcatgaaagaaaacgatgaatgtgtatgtgaaagtctgggtttagaatgataaatgcatcagagtgagaagg

SEQ ID NO: 56721 - DNA, 80 bp, synthetic construct; identical to SEQ ID NO: 14849
  source 1..80: mol_type = other DNA

SEQ ID NO: 56722 - DNA, 80 bp, synthetic construct
  source 1..80: mol_type = other DNA
atgctttttaaaaaacactttcacaagttctgcagtccaaagatcagccagctatggaacagattatttttcttcaaaat

SEQ ID NO: 56723 - DNA, 80 bp, synthetic construct
  source 1..80: mol_type = other DNA
cagaaggaaacacaagtgacaggacaacagcaggttcagaaggataagtgcagatacgtaggtatacacaagatgcgacc

SEQ ID NO: 56724 - DNA, 80 bp, synthetic construct
  source 1..80: mol_type = other DNA
taaggagaaataatacatagatatttgtggattatgggtggtctcaggagaggaatttaggccatagaactgagagtcat

SEQ ID NO: 56725 - DNA, 80 bp, synthetic construct; identical to SEQ ID NO: 14850
  source 1..80: mol_type = other DNA

SEQ ID NO: 56726 - DNA, 80 bp, synthetic construct
  source 1..80: mol_type = other DNA
cttatgtttttaaggtaaatgacatgtttaaatgttaagagactgggcagggaagccctgaagagacagctgagctcatt

SEQ ID NO: 56727 - DNA, 80 bp, synthetic construct
  source 1..80: mol_type = other DNA
atcttaaataaaactgtctgaagccagtgtgcatcttgtacgttatggattctaaccttccccatcactagattttggaa

SEQ ID NO: 56728 - DNA, 80 bp, synthetic construct
  source 1..80: mol_type = other DNA
tcaagaccatgcaaccctgctgtcttgagagaggaaagcttgtgaccacccacaaagacccaggaagagccctagggtcc

SEQ ID NO: 56729 - DNA, 80 bp, synthetic construct; identical to SEQ ID NO: 14851
  source 1..80: mol_type = other DNA

SEQ ID NO: 56730 - DNA, 80 bp, synthetic construct
  source 1..80: mol_type = other DNA
ttattatgagggccagagggaacatagactatgaggaccagatagatcaatgagcccctaaaatctgtgatccctgaagc

SEQ ID NO: 56731 - DNA, 80 bp, synthetic construct
  source 1..80: mol_type = other DNA
catgttgtggggtctataattgatgactgtgagcacaggaacagtgatgaggaactgaggccgagtggaggcagatgaga

SEQ ID NO: 56732 - DNA, 80 bp, synthetic construct
  source 1..80: mol_type = other DNA
tggtcaagagagctccagttcacagttcattttcagagttagagaaagagatgtaaaaagataagttacaccttcttctg

SEQ ID NO: 56733 - DNA, 80 bp, synthetic construct; identical to SEQ ID NO: 14852
  source 1..80: mol_type = other DNA

SEQ ID NO: 56734 - DNA, 80 bp, synthetic construct
  source 1..80: mol_type = other DNA
tgtaataacatttttatctttaaattactagtcttgttatttcattttcatataagaatacccaggacagcattacctgt

SEQ ID NO: 56735 - DNA, 80 bp, synthetic construct
  source 1..80: mol_type = other DNA
atttgatactcatagagaaggtcacaaaacatttactatttaatgtaatgatgaagtacatatattacgttaatatttta

SEQ ID NO: 56736 - DNA, 80 bp, synthetic construct
  source 1..80: mol_type = other DNA
agacatcgaggaagtatttgtctaattatctatggcaggtaaatgacaaggagaaaagtcccacccaggcagttactaaa

SEQ ID NO: 56737 - DNA, 80 bp, synthetic construct; identical to SEQ ID NO: 14853
  source 1..80: mol_type = other DNA

SEQ ID NO: 56738 - DNA, 80 bp, synthetic construct
  source 1..80: mol_type = other DNA
tttgctataaggcaggttatatcatccccatattgaagacaaggaatcgaagtccaagagaggcagtgtcgttaaagctg

SEQ ID NO: 56739 - DNA, 80 bp, synthetic construct
  source 1..80: mol_type = other DNA
ctaatcttaaacacacccttggacaaaggcaagacagacagactcagacctcatttgagttctgagatgggtactctaat

SEQ ID NO: 56740 - DNA, 80 bp, synthetic construct
  source 1..80: mol_type = other DNA
atgggccagcagaatatttgagatcaccttcagagcaaagaaaacgcataatctccccaaacatcatgacttatctgact

SEQ ID NO: 56741 - DNA, 80 bp, synthetic construct; identical to SEQ ID NO: 14854
  source 1..80: mol_type = other DNA

SEQ ID NO: 56742 - DNA, 80 bp, synthetic construct
  source 1..80: mol_type = other DNA
cagggccactccaggtaagagccgaactgccattcttggagggtctggctcagggaacaattcctaggggacgttatctt

SEQ ID NO: 56743 - DNA, 80 bp, synthetic construct
  source 1..80: mol_type = other DNA
cccagtggtcagtgtctttggggaaaatgggaccaagaggtcctggataaccttggacagacaaggtttgcagagagaga

SEQ ID NO: 56744 - DNA, 80 bp, synthetic construct
  source 1..80: mol_type = other DNA
acatcccttggacaattaaggagagaagggagggagggggataggttttagcccctgaaggcattctcattaaaggtact

SEQ ID NO: 56745 - DNA, 80 bp, synthetic construct; identical to SEQ ID NO: 14855
  source 1..80: mol_type = other DNA

SEQ ID NO: 56746 - DNA, 80 bp, synthetic construct
  source 1..80: mol_type = other DNA
ggccccggtgtatgatgttccccttcctgtgtccatgtgttctcattgttcagttcccacctatgagtgagaacatgtgg

SEQ ID NO: 56747 - DNA, 80 bp, synthetic construct
  source 1..80: mol_type = other DNA
gttgggttggttccaagtctttgctattgtgaatagtgccgcaataaacatatgtgtgcatgtgtctttatagcagcatg

SEQ ID NO: 56748 - DNA, 80 bp, synthetic construct
  source 1..80: mol_type = other DNA
aggatgtggagaaataggaacacttttactctgttggtgggactgtaaactagttcaaccattgtactctcaggacattt

SEQ ID NO: 56749 - DNA, 80 bp, synthetic construct; identical to SEQ ID NO: 14856
  source 1..80: mol_type = other DNA

SEQ ID NO: 56750 - DNA, 80 bp, synthetic construct
  source 1..80: mol_type = other DNA
tgacggatgcagcgcccccatcccataggcagagctgtcatgtgggatgagggacagtgttgggagccaccaaggaaacc

SEQ ID NO: 56751 - DNA, 80 bp, synthetic construct
  source 1..80: mol_type = other DNA
tgaatgttcaatcaaaacctgctggagggagagctggagccataggggagtgggtaaagtgggcagggctgattccacaa

SEQ ID NO: 56752 - DNA, 80 bp, synthetic construct
  source 1..80: mol_type = other DNA
gaataagagacgaattcattcagatcagtggtttcaaaccgtgctctgggcaactcaattgctaagggttccacaaacag

SEQ ID NO: 56753 - DNA, 80 bp, synthetic construct; identical to SEQ ID NO: 14857
  source 1..80: mol_type = other DNA

SEQ ID NO: 56754 - DNA, 80 bp, synthetic construct
  source 1..80: mol_type = other DNA
atatctgagtcaagacctgggatcttgccttagcaatgacactggagactaaaggtggactccatggtgcccttgagccc

SEQ ID NO: 56755 - DNA, 80 bp, synthetic construct
  source 1..80: mol_type = other DNA
tgaagatactcaaacagaaacaaacatgtgccgtgtcactgataattctgtgtagacacacacctgccagacactgctca

SEQ ID NO: 56756 - DNA, 80 bp, synthetic construct
  source 1..80: mol_type = other DNA
tcaaaaagaggaccaacaagttcatgaggcaccaatcagactgaaatgtcaaaattaagcataactggcggaaacccaga

SEQ ID NO: 56757 - DNA, 80 bp, synthetic construct; identical to SEQ ID NO: 14858
  source 1..80: mol_type = other DNA

SEQ ID NO: 56758 - DNA, 80 bp, synthetic construct
  source 1..80: mol_type = other DNA
cctctaaacccaaaggactctacccccacaggtccctggttgttgtggtgattttcattgtgtaaaatactttccacatc

SEQ ID NO: 56759 - DNA, 80 bp, synthetic construct
  source 1..80: mol_type = other DNA
aacaacaggagcaagttgaggaattctcaagaaactggtcgagaagagagagcgcttagctatggaaaagagaaagaagg

SEQ ID NO: 56760 - DNA, 80 bp, synthetic construct
  source 1..80: mol_type = other DNA
ccctgttttttctcccagtgaccccacgtgaaacgtctccgcctcctccagccaccagcagaagggactgccttcccctc

SEQ ID NO: 56761 - DNA, 80 bp, synthetic construct
  source 1..80: mol_type = other DNA
gaactcggtactaggaaaactcctattttaaaatccagccctgggtgggaagatttgggaagaatcgttaatattgagag

SEQ ID NO: 56762 - DNA, 80 bp, synthetic construct; identical to SEQ ID NO: 14859
  source 1..80: mol_type = other DNA

SEQ ID NO: 56763 - DNA, 80 bp, synthetic construct
  source 1..80: mol_type = other DNA
ggttggcctaagggaccttagtgccgggcggaaaggggactttgggttggggattcatggggggagcccatctggagctt

SEQ ID NO: 56764 - DNA, 80 bp, synthetic construct
  source 1..80: mol_type = other DNA
gaggtggagatggcacagcaggccacacagagaagaaacctacagggaggtagctgggtttgaggtgcttgaggggcaga

SEQ ID NO: 56765 - DNA, 80 bp, synthetic construct
  source 1..80: mol_type = other DNA
agagaccaaaaaaacccaagtgcagtgtgaggagaggcccgcagagaagagtcttggaagctgaggggaggtgacctcag

SEQ ID NO: 56766 - DNA, 80 bp, synthetic construct; identical to SEQ ID NO: 14860
  source 1..80: mol_type = other DNA

SEQ ID NO: 56767 - DNA, 80 bp, synthetic construct
  source 1..80: mol_type = other DNA
tatcaggatgtgggattgagccctggaccttttttctagaaagaggaaaaaaatgaagggaggaggaggaggaagctggg

SEQ ID NO: 56768 - DNA, 80 bp, synthetic construct
  source 1..80: mol_type = other DNA
caattggcaaaaactgttactaagactttgtagaggcaccaatcagtgacatggcagcattttctttcacagtaatcaac

SEQ ID NO: 56769 - DNA, 80 bp, synthetic construct
  source 1..80: mol_type = other DNA
ggaggtctggggatctctgcttgtaatcagctccctagaggttcccatgtagccagataagtattgtcagaacactgaag

SEQ ID NO: 56770 - DNA, 80 bp, synthetic construct
  source 1..80: mol_type = other DNA
aggcagggagatgaggtaggaaactgctattatttgtcagggaaattgcaatcaaggcatgagttagaacagggaaaaca

SEQ ID NO: 56771 - DNA, 80 bp, synthetic construct; identical to SEQ ID NO: 14861
  source 1..80: mol_type = other DNA

SEQ ID NO: 56772 - DNA, 80 bp, synthetic construct
  source 1..80: mol_type = other DNA
tgtaggtaattcacaactgagatttagacataagttgaatagtgtaatggacattgagttaaccgaggtaatgaagtagt

SEQ ID NO: 56773 - DNA, 80 bp, synthetic construct
  source 1..80: mol_type = other DNA
ctccaggaagtagaaaggaaagaactgagtgattagggacctagaagactaatttgagacattcctcttgatgagctgtt

SEQ ID NO: 56774 - DNA, 80 bp, synthetic construct
  source 1..80: mol_type = other DNA
gcaccatcatggctcactgcagcctcaacctcctgggctcaagtgatcctcctgcctcagcctcccatgtagctagaact

SEQ ID NO: 56775 - DNA, 80 bp, synthetic construct; identical to SEQ ID NO: 14862
  source 1..80: mol_type = other DNA

SEQ ID NO: 56776 - DNA, 80 bp, synthetic construct
  source 1..80: mol_type = other DNA
aggacgggatttctactactcaagcatgtaggagctcaggatattctgtaaatatgaagattttgagtttttgtaggtga

SEQ ID NO: 56777 - DNA, 80 bp, synthetic construct
  source 1..80: mol_type = other DNA
atcaagatagaactttgaaaaggtaggtaatttcacagttgatcaaatattctttgcccaaattacttttggttaaaatt

SEQ ID NO: 56778 - DNA, 80 bp, synthetic construct
  source 1..80: mol_type = other DNA
ttttcaacatctaggaatcaattacatagtgaacatgcctaagaaataataatctgggcagatgcagtggctcaggcccg

SEQ ID NO: 56779 - DNA, 80 bp, synthetic construct; identical to SEQ ID NO: 14863
  source 1..80: mol_type = other DNA

SEQ ID NO: 56780 - DNA, 80 bp, synthetic construct
  source 1..80: mol_type = other DNA
ggaaggaaggaaagaaggacaatctcaaattctatttcattatttttcttccacgctcctagtccagcctagggtgaatg

SEQ ID NO: 56781 - DNA, 80 bp, synthetic construct
  source 1..80: mol_type = other DNA
gggtcgtgtccaccaacctgatccgtaatggagactggaccttccagatcctggtgatgctggaaatgaccccccagcag

SEQ ID NO: 56782 - DNA, 80 bp, synthetic construct
  source 1..80: mol_type = other DNA
tctggggtccactcatcttatcttctgcatctataccctggggccatgtccaaaccccatctttcttctataccagctcc

SEQ ID NO: 56783 - DNA, 80 bp, synthetic construct
  source 1..80: mol_type = other DNA
cacacttaggaactgacctcacacataggaacagttctcttccttcagcattttagcctcttctcaggcattttgagagg

SEQ ID NO: 56784 - DNA, 80 bp, synthetic construct; identical to SEQ ID NO: 14864
  source 1..80: mol_type = other DNA

SEQ ID NO: 56785 - DNA, 80 bp, synthetic construct
  source 1..80: mol_type = other DNA
ctggcatattcacacttattccacgatgaggggtttgacagaaaagaaatgtcagaaagctctagaggccactgatatca

SEQ ID NO: 56786 - DNA, 80 bp, synthetic construct
  source 1..80: mol_type = other DNA
tctgaggtggtttcaatggctgattatataacctttcgtctttcatttcagttcaacgaggatctgcataaacaggtaat

SEQ ID NO: 56787 - DNA, 80 bp, synthetic construct
  source 1..80: mol_type = other DNA
ttgctgaaggaagcagagatcaactctgttatttatcagcctgagacgcatcctctcaccataatttttctctcctggac

SEQ ID NO: 56788 - DNA, 80 bp, synthetic construct; identical to SEQ ID NO: 14865
  source 1..80: mol_type = other DNA

SEQ ID NO: 56789 - DNA, 80 bp, synthetic construct
  source 1..80: mol_type = other DNA
aagaagagaaccatgaaaatggggatatgttaactattgtataatggggcctgttacacatgacactcttctgaattgac

SEQ ID NO: 56790 - DNA, 80 bp, synthetic construct
  source 1..80: mol_type = other DNA
tcccacagcactaattcaacatataccttactgagagcatgttttatcattaccattaagaagttaaatgaacatcagaa

SEQ ID NO: 56791 - DNA, 80 bp, synthetic construct
  source 1..80: mol_type = other DNA
aattttcatacagacagaaatgactccccactggggaaagagcaaagcaatacatgtagcactctttttcaaacactggt

SEQ ID NO: 56792 - DNA, 80 bp, synthetic construct; identical to SEQ ID NO: 14866
  source 1..80: mol_type = other DNA

SEQ ID NO: 56793 - DNA, 80 bp, synthetic construct
  source 1..80: mol_type = other DNA
gtctgcagagaggctggactgagtcagggagtcaggaaagagaagccacacacaaggacaaccaatcatgtttctcataa

SEQ ID NO: 56794 - DNA, 80 bp, synthetic construct
  source 1..80: mol_type = other DNA
atagtaaataaggaccctttatctgtcttattttcccttttggcttcacaggaaacttgtgagaaacctatgcagcataa

SEQ ID NO: 56795 - DNA, 80 bp, synthetic construct
  source 1..80: mol_type = other DNA
agagtcactgagcagttaacattacaaattacaaaccatatccagtcagagtcattctctttcctgcttgtctcctgtac

SEQ ID NO: 56796 - DNA, 80 bp, synthetic construct; identical to SEQ ID NO: 14867
  source 1..80: mol_type = other DNA

SEQ ID NO: 56797 - DNA, 80 bp, synthetic construct
  source 1..80: mol_type = other DNA
ggtagaggagtcttgaggtacatcagtcattggagttgaagagcagagattcaaaggaaagttggaactggagctttaaa

SEQ ID NO: 56798 - DNA, 80 bp, synthetic construct
  source 1..80: mol_type = other DNA
gtggtccacccaacagacaacactgcctcagatggttatcaaggggtaccctaagaagaaatcatctcaccctctctttg

SEQ ID NO: 56799 - DNA, 80 bp, synthetic construct
  source 1..80: mol_type = other DNA
tgttgcattgtaaactgtccctgaaattactgtgcacttggcttatgggatgaaacatcctcctagttcttttgtctctc

SEQ ID NO: 56800 - DNA, 80 bp, synthetic construct; identical to SEQ ID NO: 14868
  source 1..80: mol_type = other DNA

SEQ ID NO: 56801 - DNA, 80 bp, synthetic construct
  source 1..80: mol_type = other DNA
tacaagagatatttatggaggacctactgtgtaccaggagcaatgctaggcattatggatatcagcagcctttggctcct

SEQ ID NO: 56802 - DNA, 80 bp, synthetic construct
  source 1..80: mol_type = other DNA
acaatagaaagggcttaaatagagaagtaaaggagaatttgggaatttgaagcaaaagcaagaagccactgaatcaagca

SEQ ID NO: 56803 - DNA, 80 bp, synthetic construct
  source 1..80: mol_type = other DNA
agtgaagagaaatgaaggatagaaacagacatctgacatcttaataattagacgtctagaaagtcagggaaatagtggag

SEQ ID NO: 56804 - DNA, 80 bp, synthetic construct; identical to SEQ ID NO: 14869
  source 1..80: mol_type = other DNA

SEQ ID NO: 56805 - DNA, 80 bp, synthetic construct
  source 1..80: mol_type = other DNA
caaaatcttacgaccaactctatacatataaatttgaaaatttagataaaacggatacgtttctagaaagatataaaggt

SEQ ID NO: 56806 - DNA, 80 bp, synthetic construct
  source 1..80: mol_type = other DNA
tcctcccacatttccaggagcagatcatgcctcttacacgtgtgattctagaacatagaatggaacagaatttttgagat

SEQ ID NO: 56807 - DNA, 80 bp, synthetic construct
  source 1..80: mol_type = other DNA
ttcttcagtgtcagaaaatatataatgtggttaacacattagtggactccgcaaaattcatattaatttaaactgaattc

SEQ ID NO: 56808 - DNA, 80 bp, synthetic construct; identical to SEQ ID NO: 14870
  source 1..80: mol_type = other DNA

SEQ ID NO: 56809 - DNA, 80 bp, synthetic construct
  source 1..80: mol_type = other DNA
tctgtaacatgaaataaataagaaccaacctccagatgtaaataagtgaacacatgagaagcacttagaatagtgcctag

SEQ ID NO: 56810 - DNA, 80 bp, synthetic construct
  source 1..80: mol_type = other DNA
gtccctaatacacctataggatgactcataggagcccctggacccggggatgctgtcagatcgcttggtctttgagacaa

SEQ ID NO: 56811 - DNA, 80 bp, synthetic construct
  source 1..80: mol_type = other DNA
aggtgttgggtattcgaaaccatgagatggtgaaatttggataaagtgaccataaaacatgggattgaggaaggcaggtg

SEQ ID NO: 56812 - DNA, 80 bp, synthetic construct; identical to SEQ ID NO: 14871
  source 1..80: mol_type = other DNA

SEQ ID NO: 56813 - DNA, 80 bp, synthetic construct
  source 1..80: mol_type = other DNA
cttaaaggttccaccaccccaagtcctatattcaccagattaggggccacctctcccaggcccatcctcctgctccccta

SEQ ID NO: 56814 - DNA, 80 bp, synthetic construct
  source 1..80: mol_type = other DNA
agtgggcatcatggcctctagttctatgtgtggcagagaggccctcccatccctccagctggactctagaggaacaggca

SEQ ID NO: 56815 - DNA, 80 bp, synthetic construct
  source 1..80: mol_type = other DNA
gggtgttcaagtgcttccttgccatgacgatgccagcaatacccctctgagcaccaaagtcaaaggtgtgaataaactct

SEQ ID NO: 56816 - DNA, 80 bp, synthetic construct; identical to SEQ ID NO: 14872
  source 1..80: mol_type = other DNA

SEQ ID NO: 56817 - DNA, 80 bp, synthetic construct
  source 1..80: mol_type = other DNA
ttactatgtgctaaacttactcattgaatcttcacacccccatgtagaagaacttattttccatagtagggaactgaccc

SEQ ID NO: 56818 - DNA, 80 bp, synthetic construct
  source 1..80: mol_type = other DNA
gatatagccataaagcaaggcagggaagtggaaggatggaataaatatttcagagtggaacaaaatcgtgaaggacatga

SEQ ID NO: 56819 - DNA, 80 bp, synthetic construct
  source 1..80: mol_type = other DNA
gtggagtgtagttttcaagtgtagtttcacctggaaatacaagttgttggcatttgaaagacctatgggatagtatctta

SEQ ID NO: 56820 - DNA, 80 bp, synthetic construct
  source 1..80: mol_type = other DNA
aaaaagtgaattattattacagtgaattacagagagtttagggttcggcctggaagaggaagtgaagccaaatgacactg

SEQ ID NO: 56821 - DNA, 80 bp, synthetic construct; identical to SEQ ID NO: 14873
  source 1..80: mol_type = other DNA

SEQ ID NO: 56822 - DNA, 80 bp, synthetic construct
  source 1..80: mol_type = other DNA
tttcattcagttaataaatgctttttgtgaactttcactctctaggtaataaggatgaaactctaaagatgggaactttg

SEQ ID NO: 56823 - DNA, 80 bp, synthetic construct
  source 1..80: mol_type = other DNA
aaaatacgatttaggaaaggttcctagggacagtgttcacctgcagatagcaaaacagagaaaggggaaatggcatttcc

SEQ ID NO: 56824 - DNA, 80 bp, synthetic construct
  source 1..80: mol_type = other DNA
aagttgtgaagtatcttaagcaggagagtaacacggtcagatttgtgtttggatggggcacctgtaggaaggatgggctg

SEQ ID NO: 56825 - DNA, 80 bp, synthetic construct; identical to SEQ ID NO: 14874
  source 1..80: mol_type = other DNA

SEQ ID NO: 56826 - DNA, 80 bp, synthetic construct
  source 1..80: mol_type = other DNA
aagttctaattttgggtcaggtcactcaagaaaagtacacaaagtcaggatagcagggatctgagtgtgtgctcctgcat

SEQ ID NO: 56827 - DNA, 80 bp, synthetic construct
  source 1..80: mol_type = other DNA
cagaaacagaacagtgaccactggcttgagttgtataaaagtcattagttgccaccctgagaggagcatcagagatgagg

SEQ ID NO: 56828 - DNA, 80 bp, synthetic construct
  source 1..80: mol_type = other DNA
atagtgagagtccatctctaagaaaacaattttggattccctgccttccatgagcaacacagcaaacataagctctgcag

SEQ ID NO: 56829 - DNA, 80 bp, synthetic construct; identical to SEQ ID NO: 14875
  source 1..80: mol_type = other DNA

SEQ ID NO: 56830 - DNA, 80 bp, synthetic construct
  source 1..80: mol_type = other DNA
aaaaggatttaactttacctagacctgaaacagatttagcatgaaatacaaaagtacgccgggcgctgccgctcacacct

SEQ ID NO: 56831 - DNA, 80 bp, synthetic construct
  source 1..80: mol_type = other DNA
aggcaggagaatggcataaacccggaaggcggagcctgcagtgaaccgagatcgcgccactgcactccagcctgggtgac

SEQ ID NO: 56832 - DNA, 80 bp, synthetic construct
  source 1..80: mol_type = other DNA
aaatttggaaggggtcacagtgtgaaaggagcgtccaactgaaatttgttataattctgactgggcacaaatcctctgga

SEQ ID NO: 56833 - DNA, 80 bp, synthetic construct; identical to SEQ ID NO: 14876
  source 1..80: mol_type = other DNA

SEQ ID NO: 56834 - DNA, 80 bp, synthetic construct
  source 1..80: mol_type = other DNA
ccccccgcccgaggagagtctgagctcagacctgcctaaccctgtccacacctgagggcatttctctacccacctggtag

SEQ ID NO: 56835 - DNA, 80 bp, synthetic construct
  source 1..80: mol_type = other DNA
caactcaggacattacaacaattcacgacagaataactgctctaagaaaggagaaaacagctaattccactggctgaaaa

SEQ ID NO: 56836 - DNA, 80 bp, synthetic construct
  source 1..80: mol_type = other DNA
gatccaaactaagaagaaatctctgaattgctagatagagaattcagaaggttgattttaagctactcaaaaagatacca

SEQ ID NO: 56837 - DNA, 80 bp, synthetic construct; identical to SEQ ID NO: 14877
  source 1..80: mol_type = other DNA

SEQ ID NO: 56838 - DNA, 80 bp, synthetic construct
  source 1..80: mol_type = other DNA
atctacacaaccaaatacaagaagctcaaagaccacctgggaaatttatcacagaaagattatcgcccaggcacatagtc

SEQ ID NO: 56839 - DNA, 80 bp, synthetic construct
  source 1..80: mol_type = other DNA
ggcaagaattttgtatccagcaaaactaagcgtcataaatgaaggagagataaagtctttttcagacaaacaaatgctga

SEQ ID NO: 56840 - DNA, 80 bp, synthetic construct
  source 1..80: mol_type = other DNA
gcaacaactagcatgagaaatagaacagtacttcacatctcaatattaacactctccacttaaaagatacagaatggcag

SEQ ID NO: 56841 - DNA, 80 bp, synthetic construct; identical to SEQ ID NO: 14878
  source 1..80: mol_type = other DNA

SEQ ID NO: 56842 - DNA, 80 bp, synthetic construct
  source 1..80: mol_type = other DNA
gaaacaatggacttaagttacactagaagaaataaacttaacagatatttacagaacattctactcaacaactgtagaat

SEQ ID NO: 56843 - DNA, 80 bp, synthetic construct
  source 1..80: mol_type = other DNA
aaactatacaaatacatggaaattaaataatttgctcctgaatgatctttgggtcaacagtgaaatcaagatgcaaaatt

SEQ ID NO: 56844 - DNA, 80 bp, synthetic construct
  source 1..80: mol_type = other DNA
caagaacaaaccaaacccaaacccagcagaagaaaagaaataacaaagagagcagaagtaaatgaaattgaaacaaaaaa

SEQ ID NO: 56845 - DNA, 80 bp, synthetic construct; identical to SEQ ID NO: 14879
  source 1..80: mol_type = other DNA

SEQ ID NO: 56846 - DNA, 80 bp, synthetic construct
  source 1..80: mol_type = other DNA
caatcctactgaaactattccaaaacagagaaggagagaatcctccctaaattattctatgaagccaggatcgccctaat

SEQ ID NO: 56847 - DNA, 80 bp, synthetic construct
  source 1..80: mol_type = other DNA
aaggatgatttaatacacacaagtcaataaatgtgatagatcacataaacagatttgaaaacaaaaatcatatgatctca

SEQ ID NO: 56848 - DNA, 80 bp, synthetic construct
  source 1..80: mol_type = other DNA
ccctgagaactggaacaagataaggatgcccactctcaccacttctattcaacatagtactggaaatcctagccagagca

SEQ ID NO: 56849 - DNA, 80 bp, synthetic construct; identical to SEQ ID NO: 14880
  source 1..80: mol_type = other DNA

SEQ ID NO: 56850 - DNA, 80 bp, synthetic construct
  source 1..80: mol_type = other DNA
atatcacatgtcagcaggttccatgatgcccacctgagccgcaaaaccagcaagtttttattatggatttcaaaaggggt

SEQ ID NO: 56851 - DNA, 80 bp, synthetic construct
  source 1..80: mol_type = other DNA
gagcagagaaccagtatgactagaatttgccaggctggaatttcctaatcctagcaagcctgagggcactgcaggagacc

SEQ ID NO: 56852 - DNA, 80 bp, synthetic construct
  source 1..80: mol_type = other DNA
atatgactctgttctgcctggccctgcaggcagtcagaccttatggttatctcccttgttccctgaaaattgctgttatc

SEQ ID NO: 56853 - DNA, 80 bp, synthetic construct; identical to SEQ ID NO: 14881
  source 1..80: mol_type = other DNA

SEQ ID NO: 56854 - DNA, 80 bp, synthetic construct
  source 1..80: mol_type = other DNA
atactgccaaaagcaatctacaaattcaatgcaatccccatcaaaatgccatcatcattctttacagagctagaaaaaaa

SEQ ID NO: 56855 - DNA, 80 bp, synthetic construct
  source 1..80: mol_type = other DNA
gacaaattgaacagaatagaagtcccagaaataaaaccaaatacttacagccaactgatcaaacaaaaacataaagtggg

SEQ ID NO: 56856 - DNA, 80 bp, synthetic construct
  source 1..80: mol_type = other DNA
gaaaaactcttctagacattggcataggcaaagagttcatgaccaagaacccaaaagcaaatgcaaaagaaacaagataa

SEQ ID NO: 56857 - DNA, 80 bp, synthetic construct; identical to SEQ ID NO: 14882
  source 1..80: mol_type = other DNA

SEQ ID NO: 56858 - DNA, 80 bp, synthetic construct
  source 1..80: mol_type = other DNA
ctggtgggaaattaaactagtacaacctatggaaaacagtacagcgatgccttaaagaactagaaatagatctaccattt

SEQ ID NO: 56859 - DNA, 80 bp, synthetic construct
  source 1..80: mol_type = other DNA
gtgatatatatatatgtgatctatatatatatagatctatatatatatatatatatatagatcacatatatatatatatg

SEQ ID NO: 56860 - DNA, 80 bp, synthetic construct
  source 1..80: mol_type = other DNA
gttctcacttataagtgggagctaagctatgaagacacaaaggcataagaattatataatggactttgaggacttccagg

SEQ ID NO: 56861 - DNA, 80 bp, synthetic construct; identical to SEQ ID NO: 14883
  source 1..80: mol_type = other DNA

SEQ ID NO: 56862 - DNA, 80 bp, synthetic construct
  source 1..80: mol_type = other DNA
cttgcttctcctctttccaccacctcagccctgtgaccagcatgacttacaggttccagcactgcaggctctctcttctc

SEQ ID NO: 56863 - DNA, 80 bp, synthetic construct
  source 1..80: mol_type = other DNA
aggcttcctctaaatacttctgttcacaaaactctcatgcctgccaaggagatctcagggttccctgcaccccagttctc

SEQ ID NO: 56864 - DNA, 80 bp, synthetic construct
  source 1..80: mol_type = other DNA
gcacaggttaagtatccatactccaagtaaatttggagagcatttcccagagatattccaaactcaggcctcataactgc

SEQ ID NO: 56865 - DNA, 80 bp, synthetic construct; identical to SEQ ID NO: 14884
  source 1..80: mol_type = other DNA

SEQ ID NO: 56866 - DNA, 80 bp, synthetic construct
  source 1..80: mol_type = other DNA
atgcagcagcagggtagaaaaggcagccataactgcaaggcaggcagaagatgtagcagagtagacaggaagcagtccaa

SEQ ID NO: 56867 - DNA, 80 bp, synthetic construct
  source 1..80: mol_type = other DNA
aaacaaactggacaaacaggaagtggctgtacagacaggaagcagccaagaaaagaggatctgggaagtgaaccttcaac

SEQ ID NO: 56868 - DNA, 80 bp, synthetic construct
  source 1..80: mol_type = other DNA
tggaatcagatgagtgaatagatagatgggtggaattgaatacatggttgagtgaacggttggatgtgaagtgagtgggt

SEQ ID NO: 56869 - DNA, 80 bp, synthetic construct; identical to SEQ ID NO: 14885
  source 1..80: mol_type = other DNA

SEQ ID NO: 56870 - DNA, 80 bp, synthetic construct
  source 1..80: mol_type = other DNA
gatagatggagagatgaagactgaaggatagaataagtggctgtggacagtcctgccacataagtggacatctagttatt

SEQ ID NO: 56871 - DNA, 80 bp, synthetic construct
  source 1..80: mol_type = other DNA
acctcaaagactttcttcatctgggatacaggcaccaacaattatcaccccacaggtgtccaacactggactagttcttc

SEQ ID NO: 56872 - DNA, 80 bp, synthetic construct
  source 1..80: mol_type = other DNA
agttgaaaccaatgacgatgagagcagtaatcacaatagctgccatttatcaagtgcttacagtgcaacaaacactgtgc

SEQ ID NO: 56873 - DNA, 80 bp, synthetic construct; identical to SEQ ID NO: 14886
  source 1..80: mol_type = other DNA

SEQ ID NO: 56874 - DNA, 80 bp, synthetic construct
  source 1..80: mol_type = other DNA
tgttggacacctgggcactgcagagaatcaggaggggagcttggagaccaggacgggtccagaaaacagtcaggagaaag

SEQ ID NO: 56875 - DNA, 80 bp, synthetic construct
  source 1..80: mol_type = other DNA
ccgtgtcactacacttaggaagaggtagagggtgggtgtgctgagttgggcagtttatgacactcagtagatagacagat

SEQ ID NO: 56876 - DNA, 80 bp, synthetic construct
  source 1..80: mol_type = other DNA
tgcacttgtggtcacagagggctgctaagaactcctcaacaggacagttcagttatggaaactgggaaggggtaagacta

SEQ ID NO: 56877 - DNA, 80 bp, synthetic construct; identical to SEQ ID NO: 14887
  source 1..80: mol_type = other DNA

SEQ ID NO: 56878 - DNA, 80 bp, synthetic construct
  source 1..80: mol_type = other DNA
ggagttccctaaagtcaattaatttcacccccaaaccccagctgactttgagggcatccgcatgcatcatgtcgccaaca

SEQ ID NO: 56879 - DNA, 80 bp, synthetic construct
  source 1..80: mol_type = other DNA
ttctgactccactctacttcctccttcctggaaatctttacctccttggcttatgtgccagtatattctactaattcttc

SEQ ID NO: 56880 - DNA, 80 bp, synthetic construct
  source 1..80: mol_type = other DNA
aagtgcatccctagtcccagcctggctttccacactgtctcttaatatctaacattctctatttatttcattcatttcat

SEQ ID NO: 56881 - DNA, 80 bp, synthetic construct; identical to SEQ ID NO: 14888
  source 1..80: mol_type = other DNA

SEQ ID NO: 56882 - DNA, 80 bp, synthetic construct
  source 1..80: mol_type = other DNA
ggttcaaaagtgtgggcccagtgtggcaatgacatatctgaagaacttcagctgcttcagtatgaatggagccagctttg

SEQ ID NO: 56883 - DNA, 80 bp, synthetic construct
  source 1..80: mol_type = other DNA
gagtggctactctgtcctggaagtcataaggaatcattgaaggattttaagcaggagagtgatggcgcatttgcaattta

SEQ ID NO: 56884 - DNA, 80 bp, synthetic construct
  source 1..80: mol_type = other DNA
aggacttaatttgattgacattaaagggattattggtgagtgatgtcggtggcatccgacttagaaaactcccagataac

SEQ ID NO: 56885 - DNA, 80 bp, synthetic construct
  source 1..80: mol_type = other DNA
tgttttgaaatgtatgtacatcatggaccggctacatcaagctaaagaacttatggctcacctcacatacttattttttg

SEQ ID NO: 56886 - DNA, 80 bp, synthetic construct; identical to SEQ ID NO: 14889
  source 1..80: mol_type = other DNA

SEQ ID NO: 56887 - DNA, 80 bp, synthetic construct
  source 1..80: mol_type = other DNA
gccagagaactgagagtcatcaagcataggtgcaggttagatgagcttttccaggaagagtgccaaaaatcagaaatgca

SEQ ID NO: 56888 - DNA, 80 bp, synthetic construct
  source 1..80: mol_type = other DNA
tatggtgcaaatattatcagtaactcaagtcagaggcactgacaagaacccactggatttgaccttctacagaggtttct

SEQ ID NO: 56889 - DNA, 80 bp, synthetic construct
  source 1..80: mol_type = other DNA
cccgtaggttatagtggtacaggtagtatttggttacatgagtaagttctttagtgatgatttgtgagattttggtgcac

SEQ ID NO: 56890 - DNA, 80 bp, synthetic construct
  source 1..80: mol_type = other DNA
taatggtctccaatctcatccaggtcgctgcaaatgccattaactcattcctttttacggctgagtagtattccatcata

SEQ ID NO: 56891 - DNA, 80 bp, synthetic construct; identical to SEQ ID NO: 14890
  source 1..80: mol_type = other DNA

SEQ ID NO: 56892 - DNA, 80 bp, synthetic construct
  source 1..80: mol_type = other DNA
ttatgtttcttggccatttgtatatcttcttttgagaattgtctatgcatgtccttagcccactttttgatggggttgtt

SEQ ID NO: 56893 - DNA, 80 bp, synthetic construct
  source 1..80: mol_type = other DNA
tatctttgtttttattgaatttgcttttgggttcttggccatgaaatccctgcctaagccaatgtctagaagggtttttc

SEQ ID NO: 56894 - DNA, 80 bp, synthetic construct
  source 1..80: mol_type = other DNA
tttccccaccatatgtttttgttcgctttgtcgaagatcagttggctgtaagtatttgggtttatccctgggttctctat

SEQ ID NO: 56895 - DNA, 80 bp, synthetic construct; identical to SEQ ID NO: 14891
  source 1..80: mol_type = other DNA

SEQ ID NO: 56896 - DNA, 80 bp, synthetic construct
  source 1..80: mol_type = other DNA
aattacagatccgttgatctaatttgaccttaagagccctgctgtaaaggcaggtcatatcatccccatactgaagacaa

SEQ ID NO: 56897 - DNA, 80 bp, synthetic construct
  source 1..80: mol_type = other DNA
actcacagacatgtgggaggaagaaaatatgaatgtgcactaatctgaagcacggccttgaacaaaggcaaaacagactc

SEQ ID NO: 56898 - DNA, 80 bp, synthetic construct
  source 1..80: mol_type = other DNA
ggccagcagaatatctgagatcaccttcagagcaaagaaaacacatcatctccccaaaactcatgactctgactggttaa

SEQ ID NO: 56899 - DNA, 80 bp, synthetic construct; identical to SEQ ID NO: 14892
  source 1..80: mol_type = other DNA

SEQ ID NO: 56900 - DNA, 80 bp, synthetic construct
  source 1..80: mol_type = other DNA
cactccaggtaagagcagagctgctattcctggagggtctggctcagggaacaattcctaggggactttctctttatgga

SEQ ID NO: 56901 - DNA, 80 bp, synthetic construct
  source 1..80: mol_type = other DNA
gtcaagttgcttgtctatggggaaatggggccaagaggttcaggataaccttggacagacaaggtttcagagagagaggt

SEQ ID NO: 56902 - DNA, 80 bp, synthetic construct
  source 1..80: mol_type = other DNA
ctccctggacaatgaaggcaagatgggagggagggggacaggttcgagcccctaaaggcactcttgttgaaggtatttct

SEQ ID NO: 56903 - DNA, 80 bp, synthetic construct; identical to SEQ ID NO: 14893
  source 1..80: mol_type = other DNA

SEQ ID NO: 56904 - DNA, 80 bp, synthetic construct
  source 1..80: mol_type = other DNA
agtgctgttctcatgtcacctcctcattttccagggtaacagtattcgaatctcctgaggacagcccctcaaaccccaaa

SEQ ID NO: 56905 - DNA, 80 bp, synthetic construct
  source 1..80: mol_type = other DNA
actgaacagtgtccagcaggaggtccatagcaacagtgtccataggcagagttgtttgtaggatgaggggtggtgttggg

SEQ ID NO: 56906 - DNA, 80 bp, synthetic construct
  source 1..80: mol_type = other DNA
taccagagctccccgtgtagaatgaatgtccaatcaaaacctgctggagggagagctggagccataggggagtgggtaga

SEQ ID NO: 56907 - DNA, 80 bp, synthetic construct; identical to SEQ ID NO: 14894
  source 1..80: mol_type = other DNA

SEQ ID NO: 56908 - DNA, 80 bp, synthetic construct
  source 1..80: mol_type = other DNA
tccctagcacaaaagagaggggggaagatccagtcagcaaacagccaacaaacacttttcaaccattaagatctggtgcc

SEQ ID NO: 56909 - DNA, 80 bp, synthetic construct
  source 1..80: mol_type = other DNA
atttgacatatgtgagctcatttggttctcacagcagttttgcaaggtaaatagtattattactattttgcctttcaaga

SEQ ID NO: 56910 - DNA, 80 bp, synthetic construct
  source 1..80: mol_type = other DNA
agatgaattcactcagatcattggttttcaaattgtgctctgggtaactcaattgtcaaagattccgcaaacaggataaa

SEQ ID NO: 56911 - DNA, 80 bp, synthetic construct; identical to SEQ ID NO: 14895
  source 1..80: mol_type = other DNA

SEQ ID NO: 56912 - DNA, 80 bp, synthetic construct
  source 1..80: mol_type = other DNA
ccccttctctactgtcctctgccaccagctgtgcatcttctatgaggggtgaggttaataaacgtgagttgctaatttgt

SEQ ID NO: 56913 - DNA, 80 bp, synthetic construct
  source 1..80: mol_type = other DNA
gcccatggtgctccctaggaagaactgcaggtggaaaaggctgccacatttctttatgtaaaaatgacaccatcaatgcc

SEQ ID NO: 56914 - DNA, 80 bp, synthetic construct
  source 1..80: mol_type = other DNA
attaactttcaggctatatagtctttcttatggcaaacttcaagaagttttaagaaatgcatttctggccaagtgcggtg

SEQ ID NO: 56915 - DNA, 80 bp, synthetic construct
  source 1..80: mol_type = other DNA
ggaggctgaggcaggaaaactgcttgaaccctggaggcggaggttgcagtgagctgagattgcaccactggactccagcc

SEQ ID NO: 56916 - DNA, 80 bp, synthetic construct; identical to SEQ ID NO: 14896
  source 1..80: mol_type = other DNA

SEQ ID NO: 56917 - DNA, 80 bp, synthetic construct
  source 1..80: mol_type = other DNA
cccaactcctcctatccctactgtttctctgcctgagggaccctccccctgatgagattctgctcctccctgagacgtga

SEQ ID NO: 56918 - DNA, 80 bp, synthetic construct
  source 1..80: mol_type = other DNA
gacctgcctaggaccacagaactcggtagtaggaaaaatcgtatttttaaatccagtcctgagtgggaagatttgaggaa

SEQ ID NO: 56919 - DNA, 80 bp, synthetic construct
  source 1..80: mol_type = other DNA
cgtgcattttgacagcgcagtgggggagttcctagcagtgatggagctggggcggcccataggcgagtacttcaatagcc

SEQ ID NO: 56920 - DNA, 80 bp, synthetic construct; identical to SEQ ID NO: 14897
  source 1..80: mol_type = other DNA

SEQ ID NO: 56921 - DNA, 80 bp, synthetic construct
  source 1..80: mol_type = other DNA
tggagatggcacagcaggccacgcagagaagaaacctgcagggagatggccgggtttgaggtgcttgaggggccagatgg

SEQ ID NO: 56922 - DNA, 80 bp, synthetic construct
  source 1..80: mol_type = other DNA
ccctggttctttgtcatggccgagaaaattcacgacacagacacacgtgaggagtgggtttgggagtggaaagtttaata

SEQ ID NO: 56923 - DNA, 80 bp, synthetic construct
  source 1..80: mol_type = other DNA
catttacatagcccacgaaaagactgactctcccaccctagtcttttattattcaaatacggtctccaactggtggtgga

SEQ ID NO: 56924 - DNA, 80 bp, synthetic construct; identical to SEQ ID NO: 14898
  source 1..80: mol_type = other DNA

SEQ ID NO: 56925 - DNA, 80 bp, synthetic construct
  source 1..80: mol_type = other DNA
tcctgctgaaaaggggcgtcgtgtcggggggctgcagttggggctcctcctgaggttgatctaaggcttcttggaagaat

SEQ ID NO: 56926 - DNA, 80 bp, synthetic construct
  source 1..80: mol_type = other DNA
ctgttacaccaatggattgtaatactggtttgtctccactagatgtcgctgtacattaccagaaacgttaatataaaagc

SEQ ID NO: 56927 - DNA, 80 bp, synthetic construct
  source 1..80: mol_type = other DNA
ttattaaatttcttaattattaaattctttcatgactttcacagaccctcttacaatgtactcaactttctgacttgtct

SEQ ID NO: 56928 - DNA, 80 bp, synthetic construct; identical to SEQ ID NO: 14899
  source 1..80: mol_type = other DNA

SEQ ID NO: 56929 - DNA, 80 bp, synthetic construct
  source 1..80: mol_type = other DNA
actttacttgccaagatataatgtttccctttggggatttacaaagtaacaaatgcagtcccatgtataattaaaatctc

SEQ ID NO: 56930 - DNA, 80 bp, synthetic construct
  source 1..80: mol_type = other DNA
atatctccacattgatattcaggatgttcctctgggctgtcaaaggttgctccctcagcttttcaggctttgacttgagt

SEQ ID NO: 56931 - DNA, 80 bp, synthetic construct
  source 1..80: mol_type = other DNA
ggctagttgtgtcaatttctgttggaagtgagctagagaggttacatttttaaacaacttagaggttttctgcctgaaaa

SEQ ID NO: 56932 - DNA, 80 bp, synthetic construct; identical to SEQ ID NO: 14900
  source 1..80: mol_type = other DNA

SEQ ID NO: 56933 - DNA, 80 bp, synthetic construct
  source 1..80: mol_type = other DNA
tttggctacttcatctgttcctctttgatgttccctataatacattactgctatttttcgtgaaaggaaaactgaggata

SEQ ID NO: 56934 - DNA, 80 bp, synthetic construct
  source 1..80: mol_type = other DNA
tgcaagaactattagttcagctaattgagtgcttgtgtctggggagagacattagagtgactattgcttgtcctgcctta

SEQ ID NO: 56935 - DNA, 80 bp, synthetic construct
  source 1..80: mol_type = other DNA
gtgtaaacaataggtcctcctaactgcaattaggaggttgagaaaaatattggaatagagtttttcctgagacacccctt

SEQ ID NO: 56936 - DNA, 80 bp, synthetic construct
  source 1..80: mol_type = other DNA
gctcccgtgctgtaatggcagtttgagccactggagctggggtttgagccccaggacccatcagtcctgctggaccatct

SEQ ID NO: 56937 - DNA, 80 bp, synthetic construct; identical to SEQ ID NO: 14901
  source 1..80: mol_type = other DNA

SEQ ID NO: 56938 - DNA, 80 bp, synthetic construct
  source 1..80: mol_type = other DNA
taataaacttgtctttacaatgagccatcccttgactgaattaggggctaaggaagtgtgctctattagtgcctctctca

SEQ ID NO: 56939 - DNA, 80 bp, synthetic construct
  source 1..80: mol_type = other DNA
agttggggttgtcgagaggaactgcttcccttcctactgggaatggtgtttctgttatttttttcactttccctatctct

SEQ ID NO: 56940 - DNA, 80 bp, synthetic construct
  source 1..80: mol_type = other DNA
gcttctatatacctattggggttatcagaaaattagcataagtcttcctttgtttgcctaaggtcctgtaatgaaaaggg

SEQ ID NO: 56941 - DNA, 80 bp, synthetic construct; identical to SEQ ID NO: 14902
  source 1..80: mol_type = other DNA

SEQ ID NO: 56942 - DNA, 80 bp, synthetic construct
  source 1..80: mol_type = other DNA
gcatgtctcacctccagccataaggcggctttctcctatctcagtaaatagaatgtatgatcgggttttacaccgagaca

SEQ ID NO: 56943 - DNA, 80 bp, synthetic construct
  source 1..80: mol_type = other DNA
tgtctctctcagtggggggaacccttggacaatacccaggctttcttgggcagaggtccctgcggccttccacagtgcat

SEQ ID NO: 56944 - DNA, 80 bp, synthetic construct
  source 1..80: mol_type = other DNA
atacagcacaggttttctgcgagcacagggttggggctagggttacagattaacagcatgtcaaggcagaagaattttcc

SEQ ID NO: 56945 - DNA, 80 bp, synthetic construct; identical to SEQ ID NO: 14903
  source 1..80: mol_type = other DNA

SEQ ID NO: 56946 - DNA, 80 bp, synthetic construct
  source 1..80: mol_type = other DNA
agaaaaagaagtgagaataaaagtatcctttcgtccccattctttcattgtgacccagggtggaggagaagacagtggaa

SEQ ID NO: 56947 - DNA, 80 bp, synthetic construct
  source 1..80: mol_type = other DNA
ttaaccatactttacccacacaaccttagcttatccaccttatgtgatcccctttgacgtcctaaatttgtgtgatctgc

SEQ ID NO: 56948 - DNA, 80 bp, synthetic construct
  source 1..80: mol_type = other DNA
caaaatggctctggttaacttccgaacctaaaatccccttgctaattaagtactatcctaattggagacggaaatgaacg

SEQ ID NO: 56949 - DNA, 80 bp, synthetic construct
  source 1..80: mol_type = other DNA
ttctagcggcacgaaagaatttggaagcggcagtgttacggtaaaaaaccgacaaggtgcctgatgaagaggatttttat

SEQ ID NO: 56950 - DNA, 80 bp, synthetic construct; identical to SEQ ID NO: 14904
  source 1..80: mol_type = other DNA

SEQ ID NO: 56951 - DNA, 80 bp, synthetic construct
  source 1..80: mol_type = other DNA
gaaaggaaactggtatgaagagattcttgagattaaagaacagatttgacgtttgctctatactcaccactccgatgttt

SEQ ID NO: 56952 - DNA, 80 bp, synthetic construct
  source 1..80: mol_type = other DNA
gagtgagaggaaaagcttcctaatgctgataaggcaggtcacccaagagagggtctcctgtttctggtggaaagcaattg

SEQ ID NO: 56953 - DNA, 80 bp, synthetic construct
  source 1..80: mol_type = other DNA
cctgtacacgtgctttaacctggaggctgccttgacacctgtaaacgtagaagggaaagagggtgagaatagccatattg

SEQ ID NO: 56954 - DNA, 80 bp, synthetic construct; identical to SEQ ID NO: 14905
  source 1..80: mol_type = other DNA

SEQ ID NO: 56955 - DNA, 80 bp, synthetic construct
  source 1..80: mol_type = other DNA
aaggatgaggagagtgacatgggtttaggaaagttgctggcgtaattggttgagagaggtgtccaaataaaagtaataca

SEQ ID NO: 56956 - DNA, 80 bp, synthetic construct
  source 1..80: mol_type = other DNA
atttgcaaaatctgtcactaagacttcatagaggcccaaatcagcgacatggcagcattttctttcatggtaatcagctg

SEQ ID NO: 56957 - DNA, 80 bp, synthetic construct
  source 1..80: mol_type = other DNA
gggaggtctggagatctgtgtttttaatcagctcccaagtgattcccatgtaaccagataagtgtcagaacactgaagat

SEQ ID NO: 56958 - DNA, 80 bp, synthetic construct
  source 1..80: mol_type = other DNA
aaatacaaaaaattagccgggcgcggtggcgggcgcctgtagtcccagctactcgggaggctgaggcaggagaatggcgt

SEQ ID NO: 56959 - DNA, 80 bp, synthetic construct; identical to SEQ ID NO: 14906
  source 1..80: mol_type = other DNA

SEQ ID NO: 56960 - DNA, 80 bp, synthetic construct
  source 1..80: mol_type = other DNA
gaacaaacaggaatccttgccttggtgaaatatatttgaactgggtcagaaatgaggccactgggtatcaagccttagct

SEQ ID NO: 56961 - DNA, 80 bp, synthetic construct
  source 1..80: mol_type = other DNA
ccacttaatctacagttgggattcagacatgggctgaccagtctgatggatgttgagtttatggaggtggttgaagtaga

SEQ ID NO: 56962 - DNA, 80 bp, synthetic construct
  source 1..80: mol_type = other DNA
ttctcaagaacagagtaaataaggacctagaagctctgatttggaacattcctgtaattgagctgttctctaggggcagt

SEQ ID NO: 56963 - DNA, 80 bp, synthetic construct
  source 1..80: mol_type = other DNA
acctcaatggatgtgacaacacagtgcagaggaggaacttagggaaaaggatgggatttctactatttaagcatgtaggg

SEQ ID NO: 56964 - DNA, 80 bp, synthetic construct; identical to SEQ ID NO: 14907
  source 1..80: mol_type = other DNA

SEQ ID NO: 56965 - DNA, 80 bp, synthetic construct
  source 1..80: mol_type = other DNA
taatcagtggctgatagataagatttcttttaaatgtgctacaaactggtaagtttgtgtgcctcctattcttctcaata

SEQ ID NO: 56966 - DNA, 80 bp, synthetic construct
  source 1..80: mol_type = other DNA
gggttcaagcgattctcctgcctcagcctcctgagtagctgggattacaggcatgcaccaccacacccagctaattttgt

SEQ ID NO: 56967 - DNA, 80 bp, synthetic construct
  source 1..80: mol_type = other DNA
gaaataataatctcaaatgctattccacttttccacttcgccactcctagtccagcctagggtgaacatctcccctccaa

SEQ ID NO: 56968 - DNA, 80 bp, synthetic construct; identical to SEQ ID NO: 14908
  source 1..80: mol_type = other DNA

SEQ ID NO: 56969 - DNA, 80 bp, synthetic construct
  source 1..80: mol_type = other DNA
catctggttttatgtgtctataccctgggaccatgtccgaccccatttttcttctatagaagacactgagtgtagtttta

SEQ ID NO: 56970 - DNA, 80 bp, synthetic construct
  source 1..80: mol_type = other DNA
tattttgagaggcaactaattgaatctgaatttgtctgttgttgaggtcacaccctctgttctagaattgagagagtgac

SEQ ID NO: 56971 - DNA, 80 bp, synthetic construct
  source 1..80: mol_type = other DNA
tctgaacctgagcctgttcttcctagaggcacagtctgattctgtgcagagcaagatgctgacaggagccaggggcttca

SEQ ID NO: 56972 - DNA, 80 bp, synthetic construct
  source 1..80: mol_type = other DNA
gatgaggggctgagacaaaaaagcaatgccagagagcttgctgaaatcacatagtcaggaaacaaagacagcttctaagg

SEQ ID NO: 56973 - DNA, 80 bp, synthetic construct; identical to SEQ ID NO: 14909
  source 1..80: mol_type = other DNA

SEQ ID NO: 56974 - DNA, 80 bp, synthetic construct
  source 1..80: mol_type = other DNA
gctccattgctaaaggaagctcagatcaactctattctttatcagcctgagattcagcctctcaccgttatttttctctc

SEQ ID NO: 56975 - DNA, 80 bp, synthetic construct
  source 1..80: mol_type = other DNA
ggatgctgctgctgagtagttgcactgaagccagtttctatcattctgttcctggattcaatgcatgatttctctcatgg

SEQ ID NO: 56976 - DNA, 80 bp, synthetic construct
  source 1..80: mol_type = other DNA
gacataagaaagaagaaaaccatgaaaatccatccaaactattgtataaggtggcctgttggacatagacctctcctgga

SEQ ID NO: 56977 - DNA, 80 bp, synthetic construct
  source 1..80: mol_type = other DNA
tgtcttcatccatttaggtctgaaaccactattcttagctattcagtggtgaacagactgcaaatctgtgttatagggcc

SEQ ID NO: 56978 - DNA, 80 bp, synthetic construct; identical to SEQ ID NO: 14910
  source 1..80: mol_type = other DNA

SEQ ID NO: 56979 - DNA, 80 bp, synthetic construct
  source 1..80: mol_type = other DNA
tttggtctaagctttccttttcgtgtagaggatggattcttaactcctgatacacataatgagcactcagtggctctctg

SEQ ID NO: 56980 - DNA, 80 bp, synthetic construct
  source 1..80: mol_type = other DNA
catgctgtaggtgtcagccgtacccagagtggagtgaacaatctgcagactaactcttgcaggatgcaaaactgaggtat

SEQ ID NO: 56981 - DNA, 80 bp, synthetic construct
  source 1..80: mol_type = other DNA
tatttattgaactctgggatttctcaggaaaaatgcagtgcagagaaaggtccctgatgagaccacagcatacagaccat

SEQ ID NO: 56982 - DNA, 80 bp, synthetic construct; identical to SEQ ID NO: 14911
  source 1..80: mol_type = other DNA

SEQ ID NO: 56983 - DNA, 80 bp, synthetic construct
  source 1..80: mol_type = other DNA
actctcacagatgccagaccatctccttcttgtccaggtgcacaaataactgctcatcttcatcagattcaaacatatac

SEQ ID NO: 56984 - DNA, 80 bp, synthetic construct
  source 1..80: mol_type = other DNA
gaatgaggaacacataggaaagtacacagaatacaagaagcaagcaggtaatgggaaagtttttaagaatgcaagggaat

SEQ ID NO: 56985 - DNA, 80 bp, synthetic construct
  source 1..80: mol_type = other DNA
aaaatattcactgaacatgtaccatgtgctcaacttattcattgaatcctcacacttccacgtagaagtgttcaaagaag

SEQ ID NO: 56986 - DNA, 80 bp, synthetic construct; identical to SEQ ID NO: 14912
  source 1..80: mol_type = other DNA

SEQ ID NO: 56987 - DNA, 80 bp, synthetic construct
  source 1..80: mol_type = other DNA
gaggctgagtcaggagactcacttgaaccgggaggaggaggttacagtgggctgagattgcgccactgcactccagactg

SEQ ID NO: 56988 - DNA, 80 bp, synthetic construct
  source 1..80: mol_type = other DNA
catgtggtggaagatttatggacagaaaaaggaaagtgacatacagaaaacagaagtgaggtacagaaacacccaattgg

SEQ ID NO: 56989 - DNA, 80 bp, synthetic construct
  source 1..80: mol_type = other DNA
ggaggcagctttaggctaaacttgatttaacaattttcctcttttggtaatcttctcaatttttagagatttaccaaaac

SEQ ID NO: 56990 - DNA, 80 bp, synthetic construct; identical to SEQ ID NO: 14913
  source 1..80: mol_type = other DNA

SEQ ID NO: 56991 - DNA, 80 bp, synthetic construct
  source 1..80: mol_type = other DNA
ccaaagcttagggccttagcgccactctcagttaccatcattttgggtttccagtctcaacacatcattcataggttaaa

SEQ ID NO: 56992 - DNA, 80 bp, synthetic construct
  source 1..80: mol_type = other DNA
agtttggagtatgctccttacacagggtccccataaaccaaaccacccaaaattaaatagatcaaagaatgagctaaata

SEQ ID NO: 56993 - DNA, 80 bp, synthetic construct
  source 1..80: mol_type = other DNA
ataactttcacaaaagaatgtaaaatctgttgtgtaaccatcgcccttacagtagactctgtttagagcctatcatgagg

SEQ ID NO: 56994 - DNA, 80 bp, synthetic construct; identical to SEQ ID NO: 14914
  source 1..80: mol_type = other DNA

SEQ ID NO: 56995 - DNA, 80 bp, synthetic construct
  source 1..80: mol_type = other DNA
gatcttggtgaaagctgttcacatcaaggataccatcttcttctgggaagaaacttccctggttagctttaccttacggg

SEQ ID NO: 56996 - DNA, 80 bp, synthetic construct
  source 1..80: mol_type = other DNA
aaggggttgattgtcctcagtcagtgaaccataaaaagctttctttacctggtgaaaatacactgtgaaataataatcta

SEQ ID NO: 56997 - DNA, 80 bp, synthetic construct
  source 1..80: mol_type = other DNA
ttggcaaaccaaacattggtcataaactattttagcaatttagaagtcaccacaccaatatgcatttaacttggatcatt

SEQ ID NO: 56998 - DNA, 80 bp, synthetic construct; identical to SEQ ID NO: 14915
  source 1..80: mol_type = other DNA

SEQ ID NO: 56999 - DNA, 80 bp, synthetic construct
  source 1..80: mol_type = other DNA
agcctgggtgacagagtgagactccgtctcaaaaaaaaaaaaaaagctccaggaattcttacccagtaaaaatgatatga

SEQ ID NO: 57000 - DNA, 80 bp, synthetic construct
  source 1..80: mol_type = other DNA
cttccttccctccttccttccttccttccttccactctctctctctctttctttctttcctttattttgagacagagtat

SEQ ID NO: 57001 - DNA, 80 bp, synthetic construct
  source 1..80: mol_type = other DNA
ggtttcaccctgttggccatccccaaaaggatatttagccttagattttgagagggatctatctgcttttgattcctggt

SEQ ID NO: 57002 - DNA, 80 bp, synthetic construct; identical to SEQ ID NO: 14916
  source 1..80: mol_type = other DNA

SEQ ID NO: 57003 - DNA, 80 bp, synthetic construct
  source 1..80: mol_type = other DNA
aaagcgattatcctgcctcagcctcctgaataggtgggactaccagtgcgagccaccacatccagctaatttttgtattt

SEQ ID NO: 57004 - DNA, 80 bp, synthetic construct
  source 1..80: mol_type = other DNA
gccaggccaaacagccaatatgtctggcttttgaactttaccaaaggtaatctcccaggtgaaaccaataagctttaaca

SEQ ID NO: 57005 - DNA, 80 bp, synthetic construct
  source 1..80: mol_type = other DNA
cagaaagatatcaaaccaaacaggtctcattccctgagctggaattgaaccctgcctggctgccatcataagatggcaaa

SEQ ID NO: 57006 - DNA, 80 bp, synthetic construct; identical to SEQ ID NO: 14917
  source 1..80: mol_type = other DNA

SEQ ID NO: 57007 - DNA, 80 bp, synthetic construct
  source 1..80: mol_type = other DNA
acaccaggtttgctacagcttaagattggctcacaaatacctttttttttttttttttttttttgagacggagtctcgct

SEQ ID NO: 57008 - DNA, 80 bp, synthetic construct
  source 1..80: mol_type = other DNA
tcactgtgttagccaggttggtcttgatctcctgacctcgtgatccacccgcctcggccacccaaagtgctgggattaca

SEQ ID NO: 57009 - DNA, 80 bp, synthetic construct
  source 1..80: mol_type = other DNA
gcttctgggttccctctttctgagtggccctagcgaccctgttagctgcacatagcctgggggccaagccacaacacaaa

SEQ ID NO: 57010 - DNA, 80 bp, synthetic construct; identical to SEQ ID NO: 14918
  source 1..80: mol_type = other DNA

SEQ ID NO: 57011 - DNA, 80 bp, synthetic construct
  source 1..80: mol_type = other DNA
ctaagacggtgaaactccgtctctactaaaaatacaaaaaaaaaaaaaattagccaggcgtggtggcgggcgcctgtggt

SEQ ID NO: 57012 - DNA, 80 bp, synthetic construct
  source 1..80: mol_type = other DNA
aagagagaaagaaaagcattgtctgcagcagggtggggaaggcaaagagttcagggaggacagagaaggacccacctatt

SEQ ID NO: 57013 - DNA, 80 bp, synthetic construct
  source 1..80: mol_type = other DNA
caacatggtgaaaccctgtctctactaaacacaaaaaattagccaggcatggtggtgggcgcccgtaatcccagctactc

SEQ ID NO: 57014 - DNA, 80 bp, synthetic construct; identical to SEQ ID NO: 14919
  source 1..80: mol_type = other DNA

SEQ ID NO: 57015 - DNA, 80 bp, synthetic construct
  source 1..80: mol_type = other DNA
gtacatgagactaatttgggagccctcattttcaaatgcacttcagtgcagtgttgttcttttggaatgttctactgcaa

SEQ ID NO: 57016 - DNA, 80 bp, synthetic construct
  source 1..80: mol_type = other DNA
acatgccaccatgcctggctaatttttttttttaatttttagtacagacagggtttcacagtgttggccagcctggtctc

SEQ ID NO: 57017 - DNA, 80 bp, synthetic construct
  source 1..80: mol_type = other DNA
tcagtatcacattttttacctcaaatactggctttgctctcaggtcccttgttcaacttagccaatgattttttttccta

SEQ ID NO: 57018 - DNA, 80 bp, synthetic construct; identical to SEQ ID NO: 14920
  source 1..80: mol_type = other DNA

SEQ ID NO: 57019 - DNA, 80 bp, synthetic construct
  source 1..80: mol_type = other DNA
ccaaccccacttctgacaccacctgataaaagaaaaacttcagccgaataaattttaaatgaggttaattgcgcaataaa

SEQ ID NO: 57020 - DNA, 80 bp, synthetic construct
  source 1..80: mol_type = other DNA
ggtacagaaacagccagattggttacagctcaatgtttgcctaacttgaacacagttcaaacagttagctacatatgatt

SEQ ID NO: 57021 - DNA, 80 bp, synthetic construct
  source 1..80: mol_type = other DNA
attggggaactgaccacagaagtaaagtaactcacccaagtcacacaactcctggtagaaacaaaattgcgtagtccccc

SEQ ID NO: 57022 - DNA, 80 bp, synthetic construct; identical to SEQ ID NO: 14921
  source 1..80: mol_type = other DNA

SEQ ID NO: 57023 - DNA, 80 bp, synthetic construct
  source 1..80: mol_type = other DNA
cagcaaaaggttgacaacaaaaaagtctattactattacagtaaaagaataaagatgagagagcatggagtccagcctgg

SEQ ID NO: 57024 - DNA, 80 bp, synthetic construct
  source 1..80: mol_type = other DNA
tgggctagagaattactcacctacagaaacgaagcccaaagaaaaaacagatgaaaaacatgatatacaagctgtgctac

SEQ ID NO: 57025 - DNA, 80 bp, synthetic construct
  source 1..80: mol_type = other DNA
aataaacactcattgtgaattttcactctttaggcactaaggatgtaactcagaagacctgggccttgtcctcaagctgc

SEQ ID NO: 57026 - DNA, 80 bp, synthetic construct; identical to SEQ ID NO: 14922
  source 1..80: mol_type = other DNA

SEQ ID NO: 57027 - DNA, 80 bp, synthetic construct
  source 1..80: mol_type = other DNA
gctgatggcaggtgtttgcattttatcccacaggacataggaagttgtgaagcatcttaagcaggacagtaacatgatga

SEQ ID NO: 57028 - DNA, 80 bp, synthetic construct
  source 1..80: mol_type = other DNA
caataatgaaacgaaaagccacaggaatcactaaatcatgtgccagaagtagggatatgaaggagtccagaatacccaac

SEQ ID NO: 57029 - DNA, 80 bp, synthetic construct
  source 1..80: mol_type = other DNA
ctaggttagtgacacagactggaaggaagctcattataagtgaagttctaaatttggatcaggtcactcaagaaaagtac

SEQ ID NO: 57030 - DNA, 80 bp, synthetic construct; identical to SEQ ID NO: 14923
  source 1..80: mol_type = other DNA

SEQ ID NO: 57031 - DNA, 80 bp, synthetic construct
  source 1..80: mol_type = other DNA
aatcttagtgctgtgagaggctgaacaggaggatcacttgaggccaggagtttgagaccagcctaggaaatacagtgaga

SEQ ID NO: 57032 - DNA, 80 bp, synthetic construct
  source 1..80: mol_type = other DNA
gattgcactccagcctgggcaacagagcaggaccctgtcgagagagagagaggagagagagagagaaaagaagaagaaga

SEQ ID NO: 57033 - DNA, 80 bp, synthetic construct
  source 1..80: mol_type = other DNA
gaggacgtgggggaaaggagacatttatgaatctctttgagtctcagtcttttcatttctaaaattgtgttaataaaagc

SEQ ID NO: 57034 - DNA, 80 bp, synthetic construct; identical to SEQ ID NO: 14924
  source 1..80: mol_type = other DNA

SEQ ID NO: 57035 - DNA, 80 bp, synthetic construct
  source 1..80: mol_type = other DNA
caatggccactgtgcgccagaccccaaggagaaaatgaggcggcgcagggacggaggagctccgaatccagcactccttt

SEQ ID NO: 57036 - DNA, 80 bp, synthetic construct
  source 1..80: mol_type = other DNA
agcccctgactactgcagagtgtaggggtaagtgaagaaaacgaaaattaggacatcataatcgccttcttcttaatgag

SEQ ID NO: 57037 - DNA, 80 bp, synthetic construct
  source 1..80: mol_type = other DNA
aaatctttgatgttttcaaacatataaggagaaggaaataatatttaattatttaattagtaattattattttatttctt

SEQ ID NO: 57038 - DNA, 80 bp, synthetic construct
  source 1..80: mol_type = other DNA
gaaaccccatctctactaaaaatacaaaaattagctgggcatggtggcacgtgcctgtaatcccagatactcgaggggct

SEQ ID NO: 57039 - DNA, 80 bp, synthetic construct; identical to SEQ ID NO: 14925
  source 1..80: mol_type = other DNA

SEQ ID NO: 57040 - DNA, 80 bp, synthetic construct
  source 1..80: mol_type = other DNA
atgttaattcatgtacttcctctttcccaagttctctagtttatagcatgtcctttcctgaggaacataaatcacatgtt

SEQ ID NO: 57041 - DNA, 80 bp, synthetic construct
  source 1..80: mol_type = other DNA
ttattaaataggagtgcaactgatagaggatcttcttacatttgctttatttcatggtgctgcccaaattcatgctgtac

SEQ ID NO: 57042 - DNA, 80 bp, synthetic construct
  source 1..80: mol_type = other DNA
aataggtataatagcataatatattattttattttatttatttagagatggagtctcactctatcacccaggctgaaatg

SEQ ID NO: 57043 - DNA, 80 bp, synthetic construct; identical to SEQ ID NO: 14926
  source 1..80: mol_type = other DNA

SEQ ID NO: 57044 - DNA, 80 bp, synthetic construct
  source 1..80: mol_type = other DNA
gtttactatgatttttgtaattcatcttaattgatgtttaataccgagagagaagtcatattgtctccagtcatttcatg

SEQ ID NO: 57045 - DNA, 80 bp, synthetic construct
  source 1..80: mol_type = other DNA
tctactaaaaatacaaaaattagctgggtgtggtggtgggcgcctgtaatcccaactacttgggaggctgaggcaggaga

SEQ ID NO: 57046 - DNA, 80 bp, synthetic construct
  source 1..80: mol_type = other DNA
attttcaaaaatggcagagccttaaccaagcttaaagagtttttctttcttaactgaacttcttggatgtgactacatga

SEQ ID NO: 57047 - DNA, 80 bp, synthetic construct; identical to SEQ ID NO: 14927
  source 1..80: mol_type = other DNA

SEQ ID NO: 57048 - DNA, 80 bp, synthetic construct
  source 1..80: mol_type = other DNA
ggcctttgggggcctttgggggctgaagaagtcagacttcttcagagaaacagaatttattggatatatataggtagata

SEQ ID NO: 57049 - DNA, 80 bp, synthetic construct
  source 1..80: mol_type = other DNA
agtccaagaccaaaaacctggggggctgctggtgcaagtccctgagtgtgaaggccagagaacctggagatctgatgtcc

SEQ ID NO: 57050 - DNA, 80 bp, synthetic construct
  source 1..80: mol_type = other DNA
gtctccaaaaaaaagaaaaagaaagtcatatattggtacagaagatactcttaaatcctacttttctggaaatattggtt

SEQ ID NO: 57051 - DNA, 80 bp, synthetic construct; identical to SEQ ID NO: 14928
  source 1..80: mol_type = other DNA

SEQ ID NO: 57052 - DNA, 80 bp, synthetic construct
  source 1..80: mol_type = other DNA
tgtctctacaaaaaaataaaaaaaaacaaaaaataaatgtagtcccaggtactgaggaagctgaggcaggaggaacactt

SEQ ID NO: 57053 - DNA, 80 bp, synthetic construct
  source 1..80: mol_type = other DNA
gcctccattgcttaagagagacttcactatttgggattttaagaaagaaatacacaaacaagcaaatctcatcagcagag

SEQ ID NO: 57054 - DNA, 80 bp, synthetic construct
  source 1..80: mol_type = other DNA
agagtttgacaaggagaagcaggtctcccttgattttctgtttggccaagaatttatcctaacatggtaccatcagaata

SEQ ID NO: 57055 - DNA, 80 bp, synthetic construct
  source 1..80: mol_type = other DNA
gagtcaagccgtgaagccagctgtcttgggggtaaggatttccatacagaaacactgtaagtaaataatttagcacttgt

SEQ ID NO: 57056 - DNA, 80 bp, synthetic construct; identical to SEQ ID NO: 14929
  source 1..80: mol_type = other DNA

SEQ ID NO: 57057 - DNA, 80 bp, synthetic construct
  source 1..80: mol_type = other DNA
cttttagcagcggctgtaaaaagcattgcacactaagcattgctagattgccaaacaaacctaattacattttttgtttg

SEQ ID NO: 57058 - DNA, 80 bp, synthetic construct
  source 1..80: mol_type = other DNA
atgtactgtgtacttgaatattgctaagtgaataattttaagtgttctcacccaacacaaaaaatatgtaaggtaatgca

SEQ ID NO: 57059 - DNA, 80 bp, synthetic construct
  source 1..80: mol_type = other DNA
atgagagattgatcaataaagattctaaaatatttgttaaaagttacaaactgagggaaagccttcgacatcgtatttgc

SEQ ID NO: 57060 - DNA, 80 bp, synthetic construct; identical to SEQ ID NO: 14930
  source 1..80: mol_type = other DNA

SEQ ID NO: 57061 - DNA, 80 bp, synthetic construct
  source 1..80: mol_type = other DNA
ttaaaggaagtatcaaaaatagtccaattttagcagatacagaagctgcaaatttagcagtagttttggcaaaccctcaa

SEQ ID NO: 57062 - DNA, 80 bp, synthetic construct
  source 1..80: mol_type = other DNA
gattcattctccaagcttaaagagctttgccctaaaaccagatcctctcatacgatgggacaaacagccccaatgttctt

SEQ ID NO: 57063 - DNA, 80 bp, synthetic construct
  source 1..80: mol_type = other DNA
aataccagggtatgtggaggggaaagtatgaaggtggaaggttatgaaacattaatgggagatacagagaaccaagaaag

SEQ ID NO: 57064 - DNA, 80 bp, synthetic construct; identical to SEQ ID NO: 14931
  source 1..80: mol_type = other DNA

SEQ ID NO: 57065 - DNA, 80 bp, synthetic construct
  source 1..80: mol_type = other DNA
gaagatcttgctaaatcaacccttgattagcattcatgcatcaatctggctgatgtatccttttcaatcccaataaatta

SEQ ID NO: 57066 - DNA, 80 bp, synthetic construct
  source 1..80: mol_type = other DNA
caggagtgacttgaaaaaagctgtgtccatgaggaaactttttggggtaatagaaatattatcttcattgtagtagtagt

SEQ ID NO: 57067 - DNA, 80 bp, synthetic construct
  source 1..80: mol_type = other DNA
aggctggagtgcagtggcgcaatcttagctcactgcaacctccccctcccaggttcaagcaattctcctgccttagcccc

SEQ ID NO: 57068 - DNA, 80 bp, synthetic construct; identical to SEQ ID NO: 14932
  source 1..80: mol_type = other DNA

SEQ ID NO: 57069 - DNA, 80 bp, synthetic construct
  source 1..80: mol_type = other DNA
ccacatctgtattaaacttgggtctcttcattgaattatgtgggtccttaaaagagcctcagagctgtgctgtctaatat

SEQ ID NO: 57070 - DNA, 80 bp, synthetic construct
  source 1..80: mol_type = other DNA
catcacagaaagtgctcacagacttagaggccaaactgtcttagaggccaaacaggtatatagaccactggagtttaatg

SEQ ID NO: 57071 - DNA, 80 bp, synthetic construct
  source 1..80: mol_type = other DNA
aggaattcgagaccagcctggccaacgtggcaaaaccctgtctctactaaaaacacaaaaaaattagctgggcatgtatc

SEQ ID NO: 57072 - DNA, 80 bp, synthetic construct; identical to SEQ ID NO: 14933
  source 1..80: mol_type = other DNA

SEQ ID NO: 57073 - DNA, 80 bp, synthetic construct
  source 1..80: mol_type = other DNA
ccggtctgacctcaaattcaccagggtggggtttttccccaccctagtgagcctgagggtactgcaggagaccagggcgt

SEQ ID NO: 57074 - DNA, 80 bp, synthetic construct
  source 1..80: mol_type = other DNA
ataggctctctgcaagaagaaaaatatggctcttttagcccaaccccacaggcagtcagaccttatggttgtctttcctt

SEQ ID NO: 57075 - DNA, 80 bp, synthetic construct
  source 1..80: mol_type = other DNA
ggcataagaaattataagagtattacttgggaactgataaatgtccatgaaatcttcacaatttatgttcagagattgaa

SEQ ID NO: 57076 - DNA, 80 bp, synthetic construct
  source 1..80: mol_type = other DNA
tgtaatcctagctacttgggaggctgaggcagaagaatggcttgaacctgggaggcagaggttgcagtgagctgagattg

SEQ ID NO: 57077 - DNA, 80 bp, synthetic construct; identical to SEQ ID NO: 14934
  source 1..80: mol_type = other DNA

SEQ ID NO: 57078 - DNA, 80 bp, synthetic construct
  source 1..80: mol_type = other DNA
gaccaacgtggtgaaactccatctctactaaaaatacaaaaattagccaggcatggtggcacatgcctgtaatcccagct

SEQ ID NO: 57079 - DNA, 80 bp, synthetic construct
  source 1..80: mol_type = other DNA
tcccctttctccttcagctgactggaacacaaacatgaaagctggaattcaagcagtcatattggacctgagagagaaga

SEQ ID NO: 57080 - DNA, 80 bp, synthetic construct
  source 1..80: mol_type = other DNA
agctaatcctaaccaagcagaacaagcacaaagtcatcaaaacataaactggagtttgcaaagcacatgtcacttccaag

SEQ ID NO: 57081 - DNA, 80 bp, synthetic construct; identical to SEQ ID NO: 14935
  source 1..80: mol_type = other DNA

SEQ ID NO: 57082 - DNA, 80 bp, synthetic construct
  source 1..80: mol_type = other DNA
ccacactgcatctatagcttccaggtacaagtcttagtatcttcaaagcatttgcaatagccataaaatggctctttcat

SEQ ID NO: 57083 - DNA, 80 bp, synthetic construct
  source 1..80: mol_type = other DNA
aacattgtaggagggtggagtgtaaacatatgaagagtctggaaccctgatggcatcattaaatgctcaaaccaatgctg

SEQ ID NO: 57084 - DNA, 80 bp, synthetic construct; identical to SEQ ID NO: 14936
  source 1..80: mol_type = other DNA

SEQ ID NO: 57085 - DNA, 80 bp, synthetic construct
  source 1..80: mol_type = other DNA
tttgtatttttagtagagatggggcttctccatgttggtcaggctggtctcgaactcctaacctcaggtgatccgcccgc

SEQ ID NO: 57086 - DNA, 80 bp, synthetic construct
  source 1..80: mol_type = other DNA
gcaacctctgcttccctggttcaagtgattctcctgcctcagcctccccagtagctgggattacagacacgtgccaccac

SEQ ID NO: 57087 - DNA, 80 bp, synthetic construct
  source 1..80: mol_type = other DNA
atctctccagtttagagcagaggttctcaacacagcctgcactttggaattgcctggggaaattttacacaagtcccttt

SEQ ID NO: 57088 - DNA, 80 bp, synthetic construct; identical to SEQ ID NO: 14937
  source 1..80: mol_type = other DNA

SEQ ID NO: 57089 - DNA, 80 bp, synthetic construct
  source 1..80: mol_type = other DNA
acaaaaattagccgggcatggtggctggcgcctgtagtcccagctacttgggaggctgaggctggagcatcgcttgagcc

SEQ ID NO: 57090 - DNA, 80 bp, synthetic construct
  source 1..80: mol_type = other DNA
aaattacggaaaatgtagatctttaaagaattagaagaccatcagctttatttggatcatgagtcaaacacacacacaca

SEQ ID NO: 57091 - DNA, 80 bp, synthetic construct
  source 1..80: mol_type = other DNA
atggatccattatgtacagtagccacagtgcctagggcccacaatactcccatggcaatgtttacatttcttttaaaata

SEQ ID NO: 57092 - DNA, 80 bp, synthetic construct; identical to SEQ ID NO: 14938
  source 1..80: mol_type = other DNA

SEQ ID NO: 57093 - DNA, 80 bp, synthetic construct
  source 1..80: mol_type = other DNA
tgtatcacgctggtcaaatgcatacaaaggagtctgtttagacagaagcgaagaagggaaagcaagcggacacctcctgg

SEQ ID NO: 57094 - DNA, 80 bp, synthetic construct
  source 1..80: mol_type = other DNA
tctctccatgactttgaaccatggggcccagagacacagaggtcaagagcagctctgctgagcggtgagtatccacactc

SEQ ID NO: 57095 - DNA, 80 bp, synthetic construct
  source 1..80: mol_type = other DNA
aaaataataatagtaagtatagagttttaacagcactaaaatcaaaagtggaaaagggacagcagcatgccccagacacc

SEQ ID NO: 57096 - DNA, 80 bp, synthetic construct; identical to SEQ ID NO: 14939
  source 1..80: mol_type = other DNA

SEQ ID NO: 57097 - DNA, 80 bp, synthetic construct
  source 1..80: mol_type = other DNA
gggtgctatttctcatcttctccctaaccctaatgtctctgaaacatgtttgttgggtttggggtttgtttgtttctata

SEQ ID NO: 57098 - DNA, 80 bp, synthetic construct
  source 1..80: mol_type = other DNA
aatctctcccagcattagtaataccagtatgccttatttcatgaggagagcaggccgattacctgacccaacaatatagc

SEQ ID NO: 57099 - DNA, 80 bp, synthetic construct; identical to SEQ ID NO: 14940
  source 1..80: mol_type = other DNA

SEQ ID NO: 57100 - DNA, 80 bp, synthetic construct
  source 1..80: mol_type = other DNA
gcgggcacctgtagtcccagcttctcaggaatctgaggcaggagaatcgcttgaacccgggaggcggaggttgcagtgag

SEQ ID NO: 57101 - DNA, 80 bp, synthetic construct
  source 1..80: mol_type = other DNA
acgtctctactaaaaatacaaaaaattagctgggcatggtggcactcgcctgtagtcccagctactcaggaggctgaggg

SEQ ID NO: 57102 - DNA, 80 bp, synthetic construct
  source 1..80: mol_type = other DNA
ctgccaactgagggaaagccagacagggtgatatgctggctctcgctgaagctgagagctgtgttcattctaccatcctg

SEQ ID NO: 57103 - DNA, 80 bp, synthetic construct; identical to SEQ ID NO: 14941
  source 1..80: mol_type = other DNA

SEQ ID NO: 57104 - DNA, 80 bp, synthetic construct
  source 1..80: mol_type = other DNA
ttgtttgtttgtctgtttgtgatggggtatctctctgtcacccaggctggagtgcagtggcaagagcatagctcactgca

SEQ ID NO: 57105 - DNA, 80 bp, synthetic construct
  source 1..80: mol_type = other DNA
aggccgagatgggcagatctcttgagcccaggagttctagaccagcctgggaaacagggcaaaatcccatctctacaaaa

SEQ ID NO: 57106 - DNA, 80 bp, synthetic construct
  source 1..80: mol_type = other DNA
agagagagagagaaggagttttgctttgttgcccaggctgagagccttgttttgactcactccctcctctgtctcatctc

SEQ ID NO: 57107 - DNA, 80 bp, synthetic construct; identical to SEQ ID NO: 14942
  source 1..80: mol_type = other DNA

SEQ ID NO: 57108 - DNA, 80 bp, synthetic construct
  source 1..80: mol_type = other DNA
aatacaaaaattagccaggcgtggcagtgcacacctgtagtcccagctatccgggaggctgaggcaggagaattgcttga

SEQ ID NO: 57109 - DNA, 80 bp, synthetic construct
  source 1..80: mol_type = other DNA
ccatcatatcacttgccttttcaaacaccatctatgactcttagtttttgggttcaagttcaactccttccataagcagt

SEQ ID NO: 57110 - DNA, 80 bp, synthetic construct
  source 1..80: mol_type = other DNA
ccacaggcccagaggcctgggcacttgccctgttcacacccagccccaccccaaaaccccgcctctacagccctgccctt

SEQ ID NO: 57111 - DNA, 80 bp, synthetic construct; identical to SEQ ID NO: 14943
  source 1..80: mol_type = other DNA

SEQ ID NO: 57112 - DNA, 80 bp, synthetic construct
  source 1..80: mol_type = other DNA
gcgggagaaacagatggggggcacctatttagatctgatcttctcttaatgtgaccctgagagggagggaagggggtgtc

SEQ ID NO: 57113 - DNA, 80 bp, synthetic construct
  source 1..80: mol_type = other DNA
accgggattattcagctgacccggtgcggggccgcgttctcagcgcgggcactagggggcggcagaggcggaggcgccag

SEQ ID NO: 57114 - DNA, 80 bp, synthetic construct
  source 1..80: mol_type = other DNA
cggggaggaggggcgggggcgcagcctacccgggctcgggctcggggtgaagggcagccctgccaggcccgccccgaggc

SEQ ID NO: 57115 - DNA, 80 bp, synthetic construct; identical to SEQ ID NO: 14944
  source 1..80: mol_type = other DNA

SEQ ID NO: 57116 - DNA, 80 bp, synthetic construct
  source 1..80: mol_type = other DNA
tcttcatgacagcacagcacaaggctgatggggagggataaggtgaccagaggtacagatgcagtaaatgtcttggaagt

SEQ ID NO: 57117 - DNA, 80 bp, synthetic construct
  source 1..80: mol_type = other DNA
cacccaggctttgtaaactctgggccctgacaccccagctggacagggcttgcagggtatctggattaagccatacaatt

SEQ ID NO: 57118 - DNA, 80 bp, synthetic construct
  source 1..80: mol_type = other DNA
atatgccacacattaaccctttaattgcaggatcagggaaagtgaggggtgcccaggggagggacaggggtggcaatgaa

SEQ ID NO: 57119 - DNA, 80 bp, synthetic construct; identical to SEQ ID NO: 14945
  source 1..80: mol_type = other DNA

SEQ ID NO: 57120 - DNA, 80 bp, synthetic construct
  source 1..80: mol_type = other DNA
gcccacccccgagacccctgtcttcaacatctgctgatttttgttggcgtttctcttttttgttattttgctttccacac

SEQ ID NO: 57121 - DNA, 80 bp, synthetic construct
  source 1..80: mol_type = other DNA
cactcctcccgtggggtgtccaggcaaccacttcacccctcccctggcctgccccgactgagggctctccacgccctggc

SEQ ID NO: 57122 - DNA, 80 bp, synthetic construct
  source 1..80: mol_type = other DNA
gggctcccaggtctgagaaggaggcatccagcactggcagctgctccagcacaggcgttcgcacctccagcaccgtccgg

SEQ ID NO: 57123 - DNA, 80 bp, synthetic construct; identical to SEQ ID NO: 14946
  source 1..80: mol_type = other DNA

SEQ ID NO: 57124 - DNA, 80 bp, synthetic construct
  source 1..80: mol_type = other DNA
cctccttcctccagcctgagtctgagatcagcccccaacccagctcttcctgttcccacctggcagccatctctgaattc

SEQ ID NO: 57125 - DNA, 80 bp, synthetic construct
  source 1..80: mol_type = other DNA
gagcagccgcaggaaggtgagctggaccacacccactggggagccctctgagtccacgtaagagaactggaaggagagag

SEQ ID NO: 57126 - DNA, 80 bp, synthetic construct
  source 1..80: mol_type = other DNA
aggagactgggggtacacgaaaggcaaagtgagcatcagaggaccggtgaaaaggaaaagaagaaagagctaagaagtgg

SEQ ID NO: 57127 - DNA, 80 bp, synthetic construct; identical to SEQ ID NO: 14947
  source 1..80: mol_type = other DNA

SEQ ID NO: 57128 - DNA, 80 bp, synthetic construct
  source 1..80: mol_type = other DNA
tccctcccagagccctagaatctagccctactgctggattctactgcagcatcctactgctgcagcccactttcatcacg

SEQ ID NO: 57129 - DNA, 80 bp, synthetic construct
  source 1..80: mol_type = other DNA
tgcagacactgggctgataaccaactggtacacactgacccagatcagttgctaaagtattgggatacttctgacctggt

SEQ ID NO: 57130 - DNA, 80 bp, synthetic construct
  source 1..80: mol_type = other DNA
gcacagcttcaggtcctggcaggtgcgagcagggctgtcctgggtccctgttggccgcctcatctgctcgatctcctccc

SEQ ID NO: 57131 - DNA, 80 bp, synthetic construct; identical to SEQ ID NO: 14948
  source 1..80: mol_type = other DNA

SEQ ID NO: 57132 - DNA, 80 bp, synthetic construct
  source 1..80: mol_type = other DNA
aagatcaaatcagcctcctggctggaataaggggctccttggggggagtctatttgtcctggagagacatcatcaagtcc

SEQ ID NO: 57133 - DNA, 80 bp, synthetic construct
  source 1..80: mol_type = other DNA
tccacaggagcctcgggttactacaggaggggcagtcttgtgggaatactaggacattcagagccctggaagtatgggga

SEQ ID NO: 57134 - DNA, 80 bp, synthetic construct
  source 1..80: mol_type = other DNA
acctccaggaccaatggggccggatgctcctgggataccctaggaagggtagtggctggttcaactgggtcctcctccca

SEQ ID NO: 57135 - DNA, 80 bp, synthetic construct; identical to SEQ ID NO: 14949
  source 1..80: mol_type = other DNA

SEQ ID NO: 57136 - DNA, 80 bp, synthetic construct
  source 1..80: mol_type = other DNA
acaggtttcaggggcgagggtgatgggagagacacctggccacgtgtctgtctgtcactcaccttctctcccttggctcc

SEQ ID NO: 57137 - DNA, 80 bp, synthetic construct
  source 1..80: mol_type = other DNA
aatcccagtcactcaccacaggacctgggggcccagcctggcctgtagctccaggtcggccttgctgaccctgaagattt

SEQ ID NO: 57138 - DNA, 80 bp, synthetic construct
  source 1..80: mol_type = other DNA
ccaccgggcctgtcttccccggggcacctatagcgccaggatctccctgaaacacacacaaggaatgtgtcctgaatggc

SEQ ID NO: 57139 - DNA, 80 bp, synthetic construct; identical to SEQ ID NO: 14950
  source 1..80: mol_type = other DNA

SEQ ID NO: 57140 - DNA, 80 bp, synthetic construct
  source 1..80: mol_type = other DNA
gggacacgcgccgagggccgattcacagatgtgcagaacagatacagctgtgacagttgtgaaaatactgggtagtctgt

SEQ ID NO: 57141 - DNA, 80 bp, synthetic construct
  source 1..80: mol_type = other DNA
tacacaccagaacccaggaacaaacatgcccgagataccgcacacccatcaacccaccagctcctgcacacacactcgcc

SEQ ID NO: 57142 - DNA, 80 bp, synthetic construct
  source 1..80: mol_type = other DNA
gccattgcccagcctccacccacacagcccagggactgcctcccaaggtctcaggggtccacctcacttactcgctttcc

SEQ ID NO: 57143 - DNA, 80 bp, synthetic construct; identical to SEQ ID NO: 14951
  source 1..80: mol_type = other DNA

SEQ ID NO: 57144 - DNA, 80 bp, synthetic construct
  source 1..80: mol_type = other DNA
cccttcccttctctgagtaagactcacccgagggccaccttctccaggggggccagggtcaccaggaaaaccaacaggac

SEQ ID NO: 57145 - DNA, 80 bp, synthetic construct
  source 1..80: mol_type = other DNA
gttgtctaattcctcaaggtattaactgcagggcatctctcactttctctccggatcctagaccccaggcatccctctgg

SEQ ID NO: 57146 - DNA, 80 bp, synthetic construct
  source 1..80: mol_type = other DNA
cctgtggggcctttaggccctggtggccctggctctcctggctgccccgactctcctttctctccacgttccccgcgtgg

SEQ ID NO: 57147 - DNA, 80 bp, synthetic construct; identical to SEQ ID NO: 14952
  source 1..80: mol_type = other DNA

SEQ ID NO: 57148 - DNA, 80 bp, synthetic construct
  source 1..80: mol_type = other DNA
caaagagattagagtcaaaaacctcctctccttccccagccaaaaaattctgatattccccacatctcattctcttttgt

SEQ ID NO: 57149 - DNA, 80 bp, synthetic construct
  source 1..80: mol_type = other DNA
ttgcttaggatggaggtgccatttcaggggcaaagtcccagatgagcagcccaaggttacagcagtgaggcagtggaggc

SEQ ID NO: 57150 - DNA, 80 bp, synthetic construct
  source 1..80: mol_type = other DNA
gccaggtggtccctgggggaaacagatacaccacagatgaggaagggaagtgagatggctgagcatgaatggtggagaga

SEQ ID NO: 57151 - DNA, 80 bp, synthetic construct; identical to SEQ ID NO: 14953
  source 1..80: mol_type = other DNA

SEQ ID NO: 57152 - DNA, 80 bp, synthetic construct
  source 1..80: mol_type = other DNA
ttgttccttcatcacctttggctccaaagtgtccctggggtccccgagctccgggctccccatctgctccctgcagggtt

SEQ ID NO: 57153 - DNA, 80 bp, synthetic construct
  source 1..80: mol_type = other DNA
tcggtgggggtggaggggtcactcaccgctgctccaggctgccccacaggaccaatgggtccagggggtccaggagggcc

SEQ ID NO: 57154 - DNA, 80 bp, synthetic construct
  source 1..80: mol_type = other DNA
ggaggagaaggcagacaagatattagagaaaggtgatgggtagagtgggaaggatgacatgacaggggccaggggtcatg

SEQ ID NO: 57155 - DNA, 80 bp, synthetic construct; identical to SEQ ID NO: 14954
  source 1..80: mol_type = other DNA

SEQ ID NO: 57156 - DNA, 80 bp, synthetic construct
  source 1..80: mol_type = other DNA
ccccaggggagccctgagaaagcagatggtcagacccccaggaaggagacaccagcccgcccataccagagaacctcaga

SEQ ID NO: 57157 - DNA, 80 bp, synthetic construct
  source 1..80: mol_type = other DNA
actgcagggccaggggggccagacggaccttcattccccttcaaaccaggtccaccctatgaaccagacatttggggaag

SEQ ID NO: 57158 - DNA, 80 bp, synthetic construct
  source 1..80: mol_type = other DNA
cagcagtgcctgggaggcctctctctcctgggaatcccctcagaccagcaggaccatccttccctggggccccaggggga

SEQ ID NO: 57159 - DNA, 80 bp, synthetic construct; identical to SEQ ID NO: 14955
  source 1..80: mol_type = other DNA

SEQ ID NO: 57160 - DNA, 80 bp, synthetic construct
  source 1..80: mol_type = other DNA
tccccggcattcctgggccactgctgggttttctcctgccccatgtggagtaactacaccaccttgtgtctctgttgggg

SEQ ID NO: 57161 - DNA, 80 bp, synthetic construct
  source 1..80: mol_type = other DNA
gacagactaatgctagggtcaggggtccattctctcctagggacaaacctacctgaggtcccaccactcctggaggacca

SEQ ID NO: 57162 - DNA, 80 bp, synthetic construct
  source 1..80: mol_type = other DNA
actctgccaggagaacgtccctgtgggctttccagacagctctggggttaaagggtctgatggagccccctgagaatggg

SEQ ID NO: 57163 - DNA, 80 bp, synthetic construct; identical to SEQ ID NO: 14956
  source 1..80: mol_type = other DNA

SEQ ID NO: 57164 - DNA, 80 bp, synthetic construct
  source 1..80: mol_type = other DNA
atcaccaccagatgttccctgtggggggaaacagagtcaaggagtgggaagagctgctttccagctgtccccgaggtcag

SEQ ID NO: 57165 - DNA, 80 bp, synthetic construct
  source 1..80: mol_type = other DNA
tacagagggaagaggagttgtcagagaaacccaaatgcccccctctggaccttgagccacctgtttctctcccctgcact

SEQ ID NO: 57166 - DNA, 80 bp, synthetic construct
  source 1..80: mol_type = other DNA
ggctcccttctctccactggcaccaggaaagccaggaaatcctagggacccctggtgagaacggagaaggggggaaattg

SEQ ID NO: 57167 - DNA, 80 bp, synthetic construct; identical to SEQ ID NO: 14957
  source 1..80: mol_type = other DNA

SEQ ID NO: 57168 - DNA, 80 bp, synthetic construct
  source 1..80: mol_type = other DNA
caaccctcacatataacagccagcccccacccagcaacacaccccacacaccccagcctctagcccctcattgcttgccc

SEQ ID NO: 57169 - DNA, 80 bp, synthetic construct
  source 1..80: mol_type = other DNA
catgagggaggtgggatctaccccagcacccactcctgcttcaccaagaccaatccccctgcaggccctttgcccaccac

SEQ ID NO: 57170 - DNA, 80 bp, synthetic construct
  source 1..80: mol_type = other DNA
tgtgcctctgtaaaacctcagcaaaacagtacgtcacatgcctacctcataggatagataggacgcatcagcacagcacc

SEQ ID NO: 57171 - DNA, 80 bp, synthetic construct; identical to SEQ ID NO: 14958
  source 1..80: mol_type = other DNA

SEQ ID NO: 57172 - DNA, 80 bp, synthetic construct
  source 1..80: mol_type = other DNA
ccagtcggtccagtgcgtccctttggcccctcaggaccatcctctcccctggaaccagggactccaacttcgccctgtgt

SEQ ID NO: 57173 - DNA, 80 bp, synthetic construct
  source 1..80: mol_type = other DNA
atgacacagaccatggggctatcatcctgtaggggtcaggctcccaagggaacacagcactggaactgtggagtctggag

SEQ ID NO: 57174 - DNA, 80 bp, synthetic construct
  source 1..80: mol_type = other DNA
agagggcaccacagatgacagagggctggggttctaatgggaattctgagaacataggtggaagcaggggctcgggagct

SEQ ID NO: 57175 - DNA, 80 bp, synthetic construct; identical to SEQ ID NO: 14959
  source 1..80: mol_type = other DNA

SEQ ID NO: 57176 - DNA, 80 bp, synthetic construct
  source 1..80: mol_type = other DNA
aacaacattgctgtctgggtagggttacggggcacaggaattgagaatgtggcagagccatatgaataatgagacaaggg

SEQ ID NO: 57177 - DNA, 80 bp, synthetic construct
  source 1..80: mol_type = other DNA
ccctctctgcacccctccctacacttcttccaacccaaatttcctgtgacctagtgaagccaactgtccatggacaagca

SEQ ID NO: 57178 - DNA, 80 bp, synthetic construct
  source 1..80: mol_type = other DNA
gcaggaagacaaagaggctcagggtcactagaggggtcatgtctggacacagacaaaatcccagcagacatttagggttc

SEQ ID NO: 57179 - DNA, 80 bp, synthetic construct; identical to SEQ ID NO: 14960
  source 1..80: mol_type = other DNA

SEQ ID NO: 57180 - DNA, 80 bp, synthetic construct
  source 1..80: mol_type = other DNA
aggtcagaaggagatggagatagaacacatttagagcatggagctgagtcccagcagcgatagccaagaaggcaagagca

SEQ ID NO: 57181 - DNA, 80 bp, synthetic construct
  source 1..80: mol_type = other DNA
agcagcctgaaggtggcccggagggacctgtggttttcagaggcccggccattcccgagggtgtgacggtcagacctcca

SEQ ID NO: 57182 - DNA, 80 bp, synthetic construct
  source 1..80: mol_type = other DNA
ggagcgaatgctgaggcagggcagtgtggggccagagcagggggagctcacagggaatgggaagcatgccgagagaggag

SEQ ID NO: 57183 - DNA, 80 bp, synthetic construct; identical to SEQ ID NO: 14961
  source 1..80: mol_type = other DNA

SEQ ID NO: 57184 - DNA, 80 bp, synthetic construct
  source 1..80: mol_type = other DNA
tcaccagggggaccaggaaggccctgggcaccagtatcaccctgcaaaatgggggaactcataagaggggcttcagagcc

SEQ ID NO: 57185 - DNA, 80 bp, synthetic construct
  source 1..80: mol_type = other DNA
cttctctccagggagccctgggagtccatcaaaacctcggtcaccctaggaggaggaaggatagccagagtgaggacacg

SEQ ID NO: 57186 - DNA, 80 bp, synthetic construct
  source 1..80: mol_type = other DNA
caggatctccaggcatccctcgggctccatcagcacctgcccggccctgggagaacaagggaagtgtcagaacaagcagg

SEQ ID NO: 57187 - DNA, 80 bp, synthetic construct; identical to SEQ ID NO: 14962
  source 1..80: mol_type = other DNA

SEQ ID NO: 57188 - DNA, 80 bp, synthetic construct
  source 1..80: mol_type = other DNA
acccgagcaccctgctcactcaccaagggtccagggcgccctgtgtatcccatggggccagggggtccacggagcgccag

SEQ ID NO: 57189 - DNA, 80 bp, synthetic construct
  source 1..80: mol_type = other DNA
cacactcactccagccaacccttccagtgccccccagagccttccctttccagggaagcagccccactcaccctcgcctg

SEQ ID NO: 57190 - DNA, 80 bp, synthetic construct
  source 1..80: mol_type = other DNA
tgccccttgccccaggttctgcccatccagcatttcccatggcttccagataatcacttagaggattccagaaactcaac

SEQ ID NO: 57191 - DNA, 80 bp, synthetic construct; identical to SEQ ID NO: 14963
  source 1..80: mol_type = other DNA

SEQ ID NO: 57192 - DNA, 80 bp, synthetic construct
  source 1..80: mol_type = other DNA
gggccctggagtgggaagagaatgcaaaagatggggtgaaagataaggggacatcaagatcttagcatgattttgaaata

SEQ ID NO: 57193 - DNA, 80 bp, synthetic construct
  source 1..80: mol_type = other DNA
ttctggttgctgggaagcacaaccatcccctcattcattaacaagccacctaacaggaaattactgggcatggtagcccc

SEQ ID NO: 57194 - DNA, 80 bp, synthetic construct
  source 1..80: mol_type = other DNA
cagacaggtgtggacactcagcctgtggctgaggagtggtctgtgcagaacagatctgggaatctgggaagcgttgattg

SEQ ID NO: 57195 - DNA, 80 bp, synthetic construct
  source 1..80: mol_type = other DNA
gtggagtcaaaggttaaaaatcagaggcgacaggaccagcacactcaaccccacttgcttctcctatttccactgcctca

SEQ ID NO: 57196 - DNA, 80 bp, synthetic construct; identical to SEQ ID NO: 14964
  source 1..80: mol_type = other DNA

SEQ ID NO: 57197 - DNA, 80 bp, synthetic construct
  source 1..80: mol_type = other DNA
tctccatctccctgagagcctctttcaggaaggtccccagaaacttccagtgtttttgtttgtttgtttgtttttctttt

SEQ ID NO: 57198 - DNA, 80 bp, synthetic construct
  source 1..80: mol_type = other DNA
gctaatttttgtatttttattagagatggggtttcaccgtgttggccaggctggtctcaaagtcctgacctcaggtgatc

SEQ ID NO: 57199 - DNA, 80 bp, synthetic construct
  source 1..80: mol_type = other DNA
catttaccccaatacatcataaaagaatctctctaagattgtgggtagatttttatttggggtaagaggagggcatggac

SEQ ID NO: 57200 - DNA, 80 bp, synthetic construct
  source 1..80: mol_type = other DNA
gctgggtgtggtggcacatgcctgtaatcccagctacttgggaggctgaagcaggagaatagcttgaacccaggaggtgg

SEQ ID NO: 57201 - DNA, 80 bp, synthetic construct; identical to SEQ ID NO: 14965
  source 1..80: mol_type = other DNA

SEQ ID NO: 57202 - DNA, 80 bp, synthetic construct
  source 1..80: mol_type = other DNA
ggctgaggcaggaggatcgcttgaacccaggaggcagaggttgcagtaagccaagatcctgccactgcactccaacctgg

SEQ ID NO: 57203 - DNA, 80 bp, synthetic construct
  source 1..80: mol_type = other DNA
acctccactcagatacctgttcccaactctagggccagaaacaaaataagaacatggagaatgggagacattcaccacca

SEQ ID NO: 57204 - DNA, 80 bp, synthetic construct
  source 1..80: mol_type = other DNA
ccaccttcattctgaccaaacagcaatgatccgtttcaaaattctctgaaatcccatatcaaccccaaatacccagagag

SEQ ID NO: 57205 - DNA, 80 bp, synthetic construct
  source 1..80: mol_type = other DNA
gagaacaactaagggacacagaacaaaatgacaaacacttggaagcaagaatgatgccagggccgaagaaaattaaacat

SEQ ID NO: 57206 - DNA, 80 bp, synthetic construct; identical to SEQ ID NO: 14966
  source 1..80: mol_type = other DNA

SEQ ID NO: 57207 - DNA, 80 bp, synthetic construct
  source 1..80: mol_type = other DNA
aattgtcacaagatagcatgaaaaactagagccagaacagaaataataaatcctttgcagtccaacctgacacagttacc

SEQ ID NO: 57208 - DNA, 80 bp, synthetic construct
  source 1..80: mol_type = other DNA
aggtagtagtttattgaccaaaagctttatgaaatccagcttcagttagacaggaagtgatcaagaaagacaggaagtgg

SEQ ID NO: 57209 - DNA, 80 bp, synthetic construct
  source 1..80: mol_type = other DNA
tcatatgtgaacagaaaatgacaagtcacagatgggaaatagctcacagccaacagccaaggatcgaaaccaacaagaag

SEQ ID NO: 57210 - DNA, 80 bp, synthetic construct; identical to SEQ ID NO: 14967
  source 1..80: mol_type = other DNA

SEQ ID NO: 57211 - DNA, 80 bp, synthetic construct
  source 1..80: mol_type = other DNA
atggaagggccatcaaaggccaaaaatggggagagatgtccagaaagtgggtccagtgggaagaagtggtggataaaatg

SEQ ID NO: 57212 - DNA, 80 bp, synthetic construct
  source 1..80: mol_type = other DNA
ttagacaccaacatggagacgaagtcactcaggaatcaaagaatcatggaaggaggcctggatactgaagggaacgggct

SEQ ID NO: 57213 - DNA, 80 bp, synthetic construct
  source 1..80: mol_type = other DNA
ggtgagggtggggcatagagttacctcctcaaggggtggcaagaggctcgactccaggatttcttcctcttcacctgggg

SEQ ID NO: 57214 - DNA, 80 bp, synthetic construct; identical to SEQ ID NO: 14968
  source 1..80: mol_type = other DNA

SEQ ID NO: 57215 - DNA, 80 bp, synthetic construct
  source 1..80: mol_type = other DNA
acctcttggcaggtggggtaggctttcagggaggggtccgatgccccctaggggaagggggaggcctgtggtgggggctc

SEQ ID NO: 57216 - DNA, 80 bp, synthetic construct
  source 1..80: mol_type = other DNA
cccttgagtttacctgataatcaggggttgtccccgtagtcatcacatcataataggggggctcgtagtcatagtagaga

SEQ ID NO: 57217 - DNA, 80 bp, synthetic construct
  source 1..80: mol_type = other DNA
gagaggttgagggtcaggagggaggtggggagaggtggaacagagggaaggggttccacatgtggggcagaagcagacat

SEQ ID NO: 57218 - DNA, 80 bp, synthetic construct; identical to SEQ ID NO: 14969
  source 1..80: mol_type = other DNA

SEQ ID NO: 57219 - DNA, 80 bp, synthetic construct
  source 1..80: mol_type = other DNA
gagacgcagagcagggaacacagctcccagccacaaattcttcataacaactctttttatttttagatgaaaataaaaag

SEQ ID NO: 57220 - DNA, 80 bp, synthetic construct
  source 1..80: mol_type = other DNA
ttgtggcctgtgaagtcttgatggttgctgctgtggagatctctgggctctgtgaggctgttggttttggggtctttccc

SEQ ID NO: 57221 - DNA, 80 bp, synthetic construct
  source 1..80: mol_type = other DNA
gagattcagagagaggcagagggtatcatccgggagaaagagtataggaggccaatcctaggtaaaaccctaagatggga

SEQ ID NO: 57222 - DNA, 80 bp, synthetic construct; identical to SEQ ID NO: 14970
  source 1..80: mol_type = other DNA

SEQ ID NO: 57223 - DNA, 80 bp, synthetic construct
  source 1..80: mol_type = other DNA
aacccattcctgagttccaatggcatttacttttgcccacacatggtgcttagcatactctccattgcaccgtaatttag

SEQ ID NO: 57224 - DNA, 80 bp, synthetic construct
  source 1..80: mol_type = other DNA
tagatgagtggatgggtggctgggggcttacatgcattaatgaatgggagcattgataaatagtgaatgaataaatgtac

SEQ ID NO: 57225 - DNA, 80 bp, synthetic construct
  source 1..80: mol_type = other DNA
tgggtcaggagatgggtgagtgagtatattgaaggagggagtggttgagttggtggaaggataatggatagatggtggct

SEQ ID NO: 57226 - DNA, 80 bp, synthetic construct; identical to SEQ ID NO: 14971
  source 1..80: mol_type = other DNA

SEQ ID NO: 57227 - DNA, 80 bp, synthetic construct
  source 1..80: mol_type = other DNA
gtcctgccatataggtaggcatctagttctcctgcagagaacagtagccctgaagatagaaaatagaaatgaaaattcat

SEQ ID NO: 57228 - DNA, 80 bp, synthetic construct
  source 1..80: mol_type = other DNA
agaagtcaatcctgcctctgattgctctggttacctcaaagacttcttcatccagaatacgggcaccaaagatgatcact

SEQ ID NO: 57229 - DNA, 80 bp, synthetic construct
  source 1..80: mol_type = other DNA
aagtaggggagtcaacatggttggagagcagtgataagagttgaagccaatggtgataagagcagtaataacaatggcta

SEQ ID NO: 57230 - DNA, 80 bp, synthetic construct
  source 1..80: mol_type = other DNA
tgcccaaggtacaggctagttcaacatgcagagaaggctgtacactctaaagcccaaactctggactagaagtgactgaa

SEQ ID NO: 57231 - DNA, 80 bp, synthetic construct; identical to SEQ ID NO: 14972
  source 1..80: mol_type = other DNA

SEQ ID NO: 57232 - DNA, 80 bp, synthetic construct
  source 1..80: mol_type = other DNA
tcctcctggtgtctgatcctaggccccatcccattacctccccccaggcctaccccaccatgtcacccatacctgggaaa

SEQ ID NO: 57233 - DNA, 80 bp, synthetic construct
  source 1..80: mol_type = other DNA
atcaggagaagggacatgccctcaggagggcataaataggggacatttgggatctagaactcagctttccagggctcaaa

SEQ ID NO: 57234 - DNA, 80 bp, synthetic construct
  source 1..80: mol_type = other DNA
ctctctttgtcttttagcttatgaatctgtctctctctgtactctctgaatacttctctcaactcttcatctgtctcctg

SEQ ID NO: 57235 - DNA, 80 bp, synthetic construct; identical to SEQ ID NO: 14973
  source 1..80: mol_type = other DNA

SEQ ID NO: 57236 - DNA, 80 bp, synthetic construct
  source 1..80: mol_type = other DNA
aatggggggcaggggctgaagctgccacgaggagccggaacaggtccagggccctgagccacacatctgtggatcccatc

SEQ ID NO: 57237 - DNA, 80 bp, synthetic construct
  source 1..80: mol_type = other DNA
aaaacaaaagatcaccttgccctcacttgctcccctatacacatactcttcacaccatcagctccagattggaaaaatcc

SEQ ID NO: 57238 - DNA, 80 bp, synthetic construct
  source 1..80: mol_type = other DNA
acatactcttcacaccatcagctccagattggaaaaatcccaaagagagttccagcaaaactttcatagaagtgtggggc

SEQ ID NO: 57239 - DNA, 80 bp, synthetic construct
  source 1..80: mol_type = other DNA
caaacaccaacacacaagggccgctttgagagacgaagggtgagtgagacagagacacagagactcacagagaccccagg

SEQ ID NO: 57240 - DNA, 80 bp, synthetic construct; identical to SEQ ID NO: 14974
  source 1..80: mol_type = other DNA

SEQ ID NO: 57241 - DNA, 80 bp, synthetic construct
  source 1..80: mol_type = other DNA
tcactgtcctcacatcttggaagttcttccttctgtaatctaatctaaatcttttgtgctgccattctgaccattttctc

SEQ ID NO: 57242 - DNA, 80 bp, synthetic construct
  source 1..80: mol_type = other DNA
aaaagaaggaaaagatcagggttgtgggcaccagggtcccaggggagcctggctggccagagggaggaggggctaggcag

SEQ ID NO: 57243 - DNA, 80 bp, synthetic construct
  source 1..80: mol_type = other DNA
aggtagtcaaggcttcctttctttctgggcttactgggctctgctctgaatcacaggtgctcaccccttatcccagagat

SEQ ID NO: 57244 - DNA, 80 bp, synthetic construct; identical to SEQ ID NO: 14975
  source 1..80: mol_type = other DNA

SEQ ID NO: 57245 - DNA, 80 bp, synthetic construct
  source 1..80: mol_type = other DNA
ctggggccgcgctcagccccagcaccagaggtaggaggaggaggaggcgatggcagcggctgcaccgctccatggctgag

SEQ ID NO: 57246 - DNA, 80 bp, synthetic construct
  source 1..80: mol_type = other DNA
agcaaggcgccgtcggggctcccggcactgctccctcctcggtggctgccgcttctgtgtgtccccggccaccctggcgc

SEQ ID NO: 57247 - DNA, 80 bp, synthetic construct
  source 1..80: mol_type = other DNA
ggcctgtaccctaagattctcttttcgggaaccccaatatcttccctagccccttccttttctaggacccaaacgtccag

SEQ ID NO: 57248 - DNA, 80 bp, synthetic construct; identical to SEQ ID NO: 14976
  source 1..80: mol_type = other DNA

SEQ ID NO: 57249 - DNA, 80 bp, synthetic construct
  source 1..80: mol_type = other DNA
gagccgaggtagagggggagcagtggtaagatgagcgagcagtcgactctggttggaagggtccagggaaatggggtcac

SEQ ID NO: 57250 - DNA, 80 bp, synthetic construct
  source 1..80: mol_type = other DNA
cgcggagagggcacgagcgaacaaggcgcctttgagaatccaccgcccccccttcctcctccggccggccccgcccccag

SEQ ID NO: 57251 - DNA, 80 bp, synthetic construct
  source 1..80: mol_type = other DNA
tcctcatacagtcacctcagtccagaaaacagcgattttaatttgaaagcgattttatgtatgagaggggaaaggagccc

SEQ ID NO: 57252 - DNA, 80 bp, synthetic construct; identical to SEQ ID NO: 14977
  source 1..80: mol_type = other DNA

SEQ ID NO: 57253 - DNA, 80 bp, synthetic construct
  source 1..80: mol_type = other DNA
cacaggaaattaaaaatagcagatcggttcctacatctccaccagccccttcaccaccaccaccaccttttttatatttc

SEQ ID NO: 57254 - DNA, 80 bp, synthetic construct
  source 1..80: mol_type = other DNA
atccacctctgggggagttccccatttccactcttcagatgggaagcaaaatgaggcaagatgagaaggaagcaaggtcc

SEQ ID NO: 57255 - DNA, 80 bp, synthetic construct
  source 1..80: mol_type = other DNA
cacaggtatctggggtcccttccaacttgggatatcaagcagatcccttggagggtttatgttcttggttctgccctgta

SEQ ID NO: 57256 - DNA, 80 bp, synthetic construct; identical to SEQ ID NO: 14978
  source 1..80: mol_type = other DNA

SEQ ID NO: 57257 - DNA, 80 bp, synthetic construct
  source 1..80: mol_type = other DNA
ccccagccccatctcaccgtccctgctgctcagggtacttctgtttgcagtaggtctccagtgatgcatacactttctcc

SEQ ID NO: 57258 - DNA, 80 bp, synthetic construct
  source 1..80: mol_type = other DNA
ggatgccccttttgggctgcacttgcttgccctttaccagaggcctggcaagggaagcagggcccactgggtttgtggga

SEQ ID NO: 57259 - DNA, 80 bp, synthetic construct
  source 1..80: mol_type = other DNA
ttaaacagaatgattgccctcaggcagccaagctctgtcttgtccatcctcatgtcacgcattttggacactagctctgt

SEQ ID NO: 57260 - DNA, 80 bp, synthetic construct; identical to SEQ ID NO: 14979
  source 1..80: mol_type = other DNA

SEQ ID NO: 57261 - DNA, 80 bp, synthetic construct
  source 1..80: mol_type = other DNA
tccctgggtacgcaaggtaaggccactggggtcactaaagatcgggaagtcaaagaggggtcaaatgtcaagaagtcaaa

SEQ ID NO: 57262 - DNA, 80 bp, synthetic construct
  source 1..80: mol_type = other DNA
gggggtaagagttatggaagattttgagatatgctgggagcccccttgtaagaggcttttgacaccccctccttacatat

SEQ ID NO: 57263 - DNA, 80 bp, synthetic construct
  source 1..80: mol_type = other DNA
gaaagaccttgtttggcagcacctccagtcccaagtagtgttaggaaggttatgaggggaaaggagggggaggggatgta

SEQ ID NO: 57264 - DNA, 80 bp, synthetic construct; identical to SEQ ID NO: 14980
  source 1..80: mol_type = other DNA

SEQ ID NO: 57265 - DNA, 80 bp, synthetic construct
  source 1..80: mol_type = other DNA
ggaagggttataaaagggcaggtaagtcagtcgggaagggtgaggtaggtaaaagaattagggaggaatttaaatggaga

SEQ ID NO: 57266 - DNA, 80 bp, synthetic construct
  source 1..80: mol_type = other DNA
aagatgaagaactcggggttcaaagagattagtttgcttaaattcatataatacatggcaggtcatacaactgactctaa

SEQ ID NO: 57267 - DNA, 80 bp, synthetic construct
  source 1..80: mol_type = other DNA
taaagtgggtgttttgaccaagatatgctctaaagtgtctctcagaatcctaggaatctgacttaagaagataagatgga

SEQ ID NO: 57268 - DNA, 80 bp, synthetic construct; identical to SEQ ID NO: 14981
  source 1..80: mol_type = other DNA

SEQ ID NO: 57269 - DNA, 80 bp, synthetic construct
  source 1..80: mol_type = other DNA
tggtctaagacgcctgggcagggcgggtccttaccctccctcttcatgccagtggccaggcacttctgatagcggcagta

SEQ ID NO: 57270 - DNA, 80 bp, synthetic construct
  source 1..80: mol_type = other DNA
gaaggttgcatggagacaccttcaccatttagtctgtttccaatctccccctagcaaaacttaaagtcctccctgtttgc

SEQ ID NO: 57271 - DNA, 80 bp, synthetic construct
  source 1..80: mol_type = other DNA
ggtcacttgctctgaccaaactccataagccctgggaatcccacaggtgatgatacatggcccagactctccctctctgt

SEQ ID NO: 57272 - DNA, 80 bp, synthetic construct; identical to SEQ ID NO: 14982
  source 1..80: mol_type = other DNA

SEQ ID NO: 57273 - DNA, 80 bp, synthetic construct
  source 1..80: mol_type = other DNA
caggtgtcttgggaaagcagatgggatcaaaagggcagaaaatcagatagatgaaaaggacatcaagaatatcagaatta

SEQ ID NO: 57274 - DNA, 80 bp, synthetic construct
  source 1..80: mol_type = other DNA
aaaaaaacacacacacacacacaaaaacaaagaatattagagttcttttaggggaggaagcatgcactgaaagatcagtc

SEQ ID NO: 57275 - DNA, 80 bp, synthetic construct
  source 1..80: mol_type = other DNA
cctgggggctgctgacaggcccggagaatcctgggggagctggagggggcagaccaggggaccccatggaagaactgatg

SEQ ID NO: 57276 - DNA, 80 bp, synthetic construct; identical to SEQ ID NO: 14983
  source 1..80: mol_type = other DNA

SEQ ID NO: 57277 - DNA, 80 bp, synthetic construct
  source 1..80: mol_type = other DNA
cactaaaattggtatacaacctcccactgctatatttgactggctaaaaaaacccaaaaacagcgtaactcctcattgtg

SEQ ID NO: 57278 - DNA, 80 bp, synthetic construct
  source 1..80: mol_type = other DNA
aagccaggtagccagagcgtgcaagggaaagagacaggcaggagagacccctcctaagacgcaggatctgcctgtaaacg

SEQ ID NO: 57279 - DNA, 80 bp, synthetic construct
  source 1..80: mol_type = other DNA
gtttacaaacaagggggcgggagcgcaaggaaaagagcaccgggggagggtgtgggggaggggtcgcagataaagcggtc

SEQ ID NO: 57280 - DNA, 80 bp, synthetic construct; identical to SEQ ID NO: 14984
  source 1..80: mol_type = other DNA

SEQ ID NO: 57281 - DNA, 80 bp, synthetic construct
  source 1..80: mol_type = other DNA
agaaagactctggcctggattgggtcgaattaagcccgtcgctctgctcagtaccaaaatgacagcgccaatgtggcagc

SEQ ID NO: 57282 - DNA, 80 bp, synthetic construct
  source 1..80: mol_type = other DNA
cgctaccggagtgccgccatattggtaaaggcattagggcgaaggtggaacggaacttcctgttctcgcgggatctaaag

SEQ ID NO: 57283 - DNA, 80 bp, synthetic construct
  source 1..80: mol_type = other DNA
gtgtcccagggccctacatccgggaggtggttcgggataaagagaactagtcttgggaacaatgtaggtgggaacttaag

SEQ ID NO: 57284 - DNA, 80 bp, synthetic construct; identical to SEQ ID NO: 14985
  source 1..80: mol_type = other DNA

SEQ ID NO: 57285 - DNA, 80 bp, synthetic construct
  source 1..80: mol_type = other DNA
tggacattcacatgaggatttacaccatggccatagccatggctactcccatgagagcctctaccacagaggacatggac

SEQ ID NO: 57286 - DNA, 80 bp, synthetic construct
  source 1..80: mol_type = other DNA
tgactctccctcaccaggcactgggggccacagtgctgatctcagcagctccattttttgtcctcttccttatccccgtg

SEQ ID NO: 57287 - DNA, 80 bp, synthetic construct
  source 1..80: mol_type = other DNA
aaagggttctttctcctttatgatccctgacctttcgatattcccccaaatacacactcattgtgtcagatattccctca

SEQ ID NO: 57288 - DNA, 80 bp, synthetic construct; identical to SEQ ID NO: 14986
  source 1..80: mol_type = other DNA

SEQ ID NO: 57289 - DNA, 80 bp, synthetic construct
  source 1..80: mol_type = other DNA
cctgaaagctgacttgcctgcctcagaatctcctcatcttatggccctcaggagggagaggacatgttggaagatctgtt

SEQ ID NO: 57290 - DNA, 80 bp, synthetic construct
  source 1..80: mol_type = other DNA
aaaagaggcttaggtaagggccagagttggtgataaatttgggcaagggacatcatcacaaatcacatggaatatgtgct

SEQ ID NO: 57291 - DNA, 80 bp, synthetic construct
  source 1..80: mol_type = other DNA
acctgaatctggctgctgacttggcacacaacttcactgatggtctggccattggggcttcctttcgagggggccgggga

SEQ ID NO: 57292 - DNA, 80 bp, synthetic construct; identical to SEQ ID NO: 14987
  source 1..80: mol_type = other DNA

SEQ ID NO: 57293 - DNA, 80 bp, synthetic construct
  source 1..80: mol_type = other DNA
ccctcttctctttttattttgatgtttagtttccaaatccatgtcccctatacctataccccaccagccacttctaaacc

SEQ ID NO: 57294 - DNA, 80 bp, synthetic construct
  source 1..80: mol_type = other DNA
tcctggctgggtcctgccatttactgcaggtggctttatctacgtagcaacagtgtctgtgttgcccgagctgctgaggg

SEQ ID NO: 57295 - DNA, 80 bp, synthetic construct
  source 1..80: mol_type = other DNA
ctggccagggacatctgccaaaggaaggaactgtagcctgggagaatggttactttggcattagggccttcaagggctgg

SEQ ID NO: 57296 - DNA, 80 bp, synthetic construct; identical to SEQ ID NO: 14988
  source 1..80: mol_type = other DNA

SEQ ID NO: 57297 - DNA, 80 bp, synthetic construct
  source 1..80: mol_type = other DNA
ggtattctcatggcctgattttttttgtttctattccttttatatcactgtgtttgaatcgagggggaggggtggtaacc

SEQ ID NO: 57298 - DNA, 80 bp, synthetic construct
  source 1..80: mol_type = other DNA
aaggctggcgggcctttgattggccccggctttgcccttgccacgcccctctgcgctgggattggcttagtgctgggatt

SEQ ID NO: 57299 - DNA, 80 bp, synthetic construct
  source 1..80: mol_type = other DNA
ggccccttacccacattttactttctgccctgtgacctctgatccctgccctctcctccccgtgcccggtccggcgtgtt

SEQ ID NO: 57300 - DNA, 80 bp, synthetic construct; identical to SEQ ID NO: 14989
  source 1..80: mol_type = other DNA

SEQ ID NO: 57301 - DNA, 80 bp, synthetic construct
  source 1..80: mol_type = other DNA
tgcacatgtctgaggatgactgggacaaagtcatagctgtcaacctcaaggtggcgatctctgaacctgcgacgtttggc

SEQ ID NO: 57302 - DNA, 80 bp, synthetic construct
  source 1..80: mol_type = other DNA
atcgtaggaaaggtcaggttgagttggacgaggtcagccagccaagtggtatagagaggagaacccctccttgagactcc

SEQ ID NO: 57303 - DNA, 80 bp, synthetic construct
  source 1..80: mol_type = other DNA
ctgagggaggtaccagcattcagccctctccagaatcggcagccactctccttcccacagacatgggatccgctgtaact

SEQ ID NO: 57304 - DNA, 80 bp, synthetic construct; identical to SEQ ID NO: 14990
  source 1..80: mol_type = other DNA

SEQ ID NO: 57305 - DNA, 80 bp, synthetic construct
  source 1..80: mol_type = other DNA
tctaggggactggtggttggtgtctgtggagaggtttgtggggagggatgtctttggtgggagattatggctgttttggg

SEQ ID NO: 57306 - DNA, 80 bp, synthetic construct
  source 1..80: mol_type = other DNA
agaacccagactatatgagaaagcaagtaaggggagtctggagccactgggaagggcagaggttcccaaggccagggaca

SEQ ID NO: 57307 - DNA, 80 bp, synthetic construct
  source 1..80: mol_type = other DNA
ttcccaggatacaaaaggggtggcagtgtatggttcaggaatgctgaatatgggaagcaggggtgcttgtgaccctaata

SEQ ID NO: 57308 - DNA, 80 bp, synthetic construct; identical to SEQ ID NO: 14991
  source 1..80: mol_type = other DNA

SEQ ID NO: 57309 - DNA, 80 bp, synthetic construct
  source 1..80: mol_type = other DNA
tctccaccttacaatagctgcagccggcctggggtcggatgggggggattaggggagggggccaggattaggggaatgaa

SEQ ID NO: 57310 - DNA, 80 bp, synthetic construct
  source 1..80: mol_type = other DNA
cgagggcacccactgctgccttgtcccagggacaggccaccccctggcagccgcagcccaagtccgggagcctcagctcg

SEQ ID NO: 57311 - DNA, 80 bp, synthetic construct
  source 1..80: mol_type = other DNA
ccacttcccactccagacattctgcccctgtgtaccccacccacacgcgcacccccccttcccaatgggagctccatctt

SEQ ID NO: 57312 - DNA, 80 bp, synthetic construct; identical to SEQ ID NO: 14992
  source 1..80: mol_type = other DNA

SEQ ID NO: 57313 - DNA, 80 bp, synthetic construct
  source 1..80: mol_type = other DNA
aggtagcccttttcacgagccctctgtcccctcctggggtcccagatattccaggccccggccccccggagctgaggccc

SEQ ID NO: 57314 - DNA, 80 bp, synthetic construct
  source 1..80: mol_type = other DNA
gtccacgtcccgtcccacccgcgccgcgaatggtgggtgacgtctccgccggcggggggagcgggtgtagcggaggagca

SEQ ID NO: 57315 - DNA, 80 bp, synthetic construct
  source 1..80: mol_type = other DNA
aggggcagtgccggcgcgggggcgggagcgggggcggagaggggcgcttctggaggggcggggtctacgcgaggggcggc

SEQ ID NO: 57316 - DNA, 80 bp, synthetic construct; identical to SEQ ID NO: 14993
  source 1..80: mol_type = other DNA

SEQ ID NO: 57317 - DNA, 80 bp, synthetic construct
  source 1..80: mol_type = other DNA
caaacacaaaaattaccttccctgttcctcattcagtgtcataagtcagtgcacataagactcactttgggagtttatta

SEQ ID NO: 57318 - DNA, 80 bp, synthetic construct
  source 1..80: mol_type = other DNA
ttttgttgaatagtttttcccaaccacagatttgtgccatcttcactcctaggccacttagccacctcagatcctcctat

SEQ ID NO: 57319 - DNA, 80 bp, synthetic construct
  source 1..80: mol_type = other DNA
ctcactgtatttctcaaaattcttattttatgggctgctgtttctaaaacccctttccctctaacccacaccacctttct

SEQ ID NO: 57320 - DNA, 80 bp, synthetic construct; identical to SEQ ID NO: 14994
  source 1..80: mol_type = other DNA

SEQ ID NO: 57321 - DNA, 80 bp, synthetic construct
  source 1..80: mol_type = other DNA
tcctagccgggaggaatacgaggcccatcaagaccgagtgcttatccgcctgagccgcctgcacaaccagcaggcattga

SEQ ID NO: 57322 - DNA, 80 bp, synthetic construct
  source 1..80: mol_type = other DNA
ctggaaatcatgggtgtaaattgcagtttcttagtaaacaactggccctgctcttcttaagaaaaatatagggctgggca

SEQ ID NO: 57323 - DNA, 80 bp, synthetic construct
  source 1..80: mol_type = other DNA
cttcttgggaggctgaggtaataggatcacttgagcctgggaagaaagtggatgttgcagtgaaccatgatcacaccact

SEQ ID NO: 57324 - DNA, 80 bp, synthetic construct; identical to SEQ ID NO: 14995
  source 1..80: mol_type = other DNA

SEQ ID NO: 57325 - DNA, 80 bp, synthetic construct
  source 1..80: mol_type = other DNA
gtttcctcagccataaaatagaggtaatataattacctgtgtcataggattcattgtattaggtaaggggattggtgcaa

SEQ ID NO: 57326 - DNA, 80 bp, synthetic construct
  source 1..80: mol_type = other DNA
attctctgaagtttaaagtctaagccctttatcctggatgccttctaaccttaaccacttgcttctacagggcccagcgt

SEQ ID NO: 57327 - DNA, 80 bp, synthetic construct
  source 1..80: mol_type = other DNA
gggggagcagtgtagggacagggggaggcggcactggtggggtgggtgggggtgccggttcggaagactctggtgaccgg

SEQ ID NO: 57328 - DNA, 80 bp, synthetic construct
  source 1..80: mol_type = other DNA
ccagccactgagaaaccaaagatcacctagatttccatcagaagtgggctttgcccaaacccaaaataccaccccaaccc

SEQ ID NO: 57329 - DNA, 80 bp, synthetic construct; identical to SEQ ID NO: 14996
  source 1..80: mol_type = other DNA

SEQ ID NO: 57330 - DNA, 80 bp, synthetic construct
  source 1..80: mol_type = other DNA
ggtggtctgggccacatagaaccatgagcctggtctaactcatcagcactcttcccctatacatcctctatctctttcta

SEQ ID NO: 57331 - DNA, 80 bp, synthetic construct
  source 1..80: mol_type = other DNA
ccctcctcagacgttgaatggctcgctgaccctggagctggtgaatgagaaattctggaaggtgtcccggccactggagc

SEQ ID NO: 57332 - DNA, 80 bp, synthetic construct
  source 1..80: mol_type = other DNA
gtggcttttatacaaagtatctatatgagattcttctatattgtacagagtggggcaaaacacgcccccatctgctgcct

SEQ ID NO: 57333 - DNA, 80 bp, synthetic construct; identical to SEQ ID NO: 14997
  source 1..80: mol_type = other DNA

SEQ ID NO: 57334 - DNA, 80 bp, synthetic construct
  source 1..80: mol_type = other DNA
ggaaagcaggaaaatggctcaaaagagaaagggatgtgtgtagatgtgggaatgaccgtgatgtttggaagtcactgcga

SEQ ID NO: 57335 - DNA, 80 bp, synthetic construct
  source 1..80: mol_type = other DNA
gctgagcggagggagggtcgcctgggaacactagttctgtgctcgtccaggcagcggctgagagcagaggagtgggggca

SEQ ID NO: 57336 - DNA, 80 bp, synthetic construct
  source 1..80: mol_type = other DNA
tccttccaccacccgtaacctctctgcccctcacttcctgtttcctctgctctgggtacccccagcccctctggccccaa

SEQ ID NO: 57337 - DNA, 80 bp, synthetic construct; identical to SEQ ID NO: 14998
  source 1..80: mol_type = other DNA

SEQ ID NO: 57338 - DNA, 80 bp, synthetic construct
  source 1..80: mol_type = other DNA
gggcgttgttcctggagtttcagggtagagaagcaggtggggaggagttgggtgagatacagaggtggaagccaaaagtc

SEQ ID NO: 57339 - DNA, 80 bp, synthetic construct
  source 1..80: mol_type = other DNA
agtcctcacctttgccccacacgcccccctctctatttatcacatttcctttcgtgtccccctaaccccatcgcttggtg

SEQ ID NO: 57340 - DNA, 80 bp, synthetic construct
  source 1..80: mol_type = other DNA
gttactgggtcaggcaaggtgagagatataaagtatgcaaaagaaaacgttactattttgttgaggaacaagatacatgt

SEQ ID NO: 57341 - DNA, 80 bp, synthetic construct; identical to SEQ ID NO: 14999
  source 1..80: mol_type = other DNA

SEQ ID NO: 57342 - DNA, 80 bp, synthetic construct
  source 1..80: mol_type = other DNA
gacactgaagaagatgccccacaaaatgttacggccttgccttatactataaagaatggcaaagggcccgtgtaggggtg

SEQ ID NO: 57343 - DNA, 80 bp, synthetic construct
  source 1..80: mol_type = other DNA
acccagcacgattttacctctcaggcttctcagtctccaaagcagagcagaccatgtatctgaacgcggaagctgagctc

SEQ ID NO: 57344 - DNA, 80 bp, synthetic construct
  source 1..80: mol_type = other DNA
cacctcagcgaggagggaggtgccgctgaaaccgccaaccacttcttcagttgggtgtggggcttagcctctcctctccc

SEQ ID NO: 57345 - DNA, 80 bp, synthetic construct; identical to SEQ ID NO: 15000
  source 1..80: mol_type = other DNA

SEQ ID NO: 57346 - DNA, 80 bp, synthetic construct
  source 1..80: mol_type = other DNA
gccacagctcacacctggcccagcactgcggcacacacctgcctgaacccaatcactgccaccagtgtggcaagggcctc

SEQ ID NO: 57347 - DNA, 80 bp, synthetic construct
  source 1..80: mol_type = other DNA
gtgaccagtgaggcaagggctatggacattgctcagggctggtgcagcaccagcaagtctgcagaagcaaaggctgcagg

SEQ ID NO: 57348 - DNA, 80 bp, synthetic construct
  source 1..80: mol_type = other DNA
aggcagggaatcagagcccctgtggctgcatcaccgcccccaatctgcagcgctctatgagggtggcagggcagcctcag

SEQ ID NO: 57349 - DNA, 80 bp, synthetic construct; identical to SEQ ID NO: 15001
  source 1..80: mol_type = other DNA

SEQ ID NO: 57350 - DNA, 80 bp, synthetic construct
  source 1..80: mol_type = other DNA
tgatggctcatggctgtaattccaacactgtgggaagccaaggtaggtggattacttgaggccaggagttcaagaccagc

SEQ ID NO: 57351 - DNA, 80 bp, synthetic construct
  source 1..80: mol_type = other DNA
tccagcctgggcgacagagtgaacctctatctcaaaacagaacaaacaaagaaaaaaatgcccttaagagttcttttata

SEQ ID NO: 57352 - DNA, 80 bp, synthetic construct
  source 1..80: mol_type = other DNA
tgatgagccatcttcctgtgcctactccttgcttcaccaggtcctgttcttacgagtttactgttactcttcatgttata

SEQ ID NO: 57353 - DNA, 80 bp, synthetic construct; identical to SEQ ID NO: 15002
  source 1..80: mol_type = other DNA

SEQ ID NO: 57354 - DNA, 80 bp, synthetic construct
  source 1..80: mol_type = other DNA
agtcctatccattttatctgctctaatatatctcaagtctgtccactcgttttcatccctccacatccctgggctagcca

SEQ ID NO: 57355 - DNA, 80 bp, synthetic construct
  source 1..80: mol_type = other DNA
tcagtcagcctccttaaacctattcagtggttttccattgatcttaggttaaagacccaagtccttaacctgacctctaa

SEQ ID NO: 57356 - DNA, 80 bp, synthetic construct
  source 1..80: mol_type = other DNA
tagctcctcttcattcttcaggcctcaccttctcaatagcctcagggaagccttcctgaccttcttttcagggtcaaatt

SEQ ID NO: 57357 - DNA, 80 bp, synthetic construct; identical to SEQ ID NO: 15003
  source 1..80: mol_type = other DNA

SEQ ID NO: 57358 - DNA, 80 bp, synthetic construct
  source 1..80: mol_type = other DNA
tcctccatcttgcctgtgagaccctctccctctttaactttttagttcccctttctggttttgcctcattgacttcagaa

SEQ ID NO: 57359 - DNA, 80 bp, synthetic construct
  source 1..80: mol_type = other DNA
tacaaaatattttttcaacttttattttaagttccggagtacaagtgcaggatgtgcaggtttgttacataggtgaacat

SEQ ID NO: 57360 - DNA, 80 bp, synthetic construct; identical to SEQ ID NO: 15004
  source 1..80: mol_type = other DNA

SEQ ID NO: 57361 - DNA, 80 bp, synthetic construct
  source 1..80: mol_type = other DNA
cactgcaacctctgcctcctgggttcaagcgattcttctgcctcagcctcccaagtagctgggactataggcgagtgcca

SEQ ID NO: 57362 - DNA, 80 bp, synthetic construct
  source 1..80: mol_type = other DNA
ttttttttttgagatagagtctcactctgtcacccaggctggagcgcattggcacaatctcagctcactgcaacctctgc

SEQ ID NO: 57363 - DNA, 80 bp, synthetic construct
  source 1..80: mol_type = other DNA
ttcctaagtgctgggattacaagtgtgagccaccacgcctggctgcatactacattttctttatctagtctttcattgat

SEQ ID NO: 57364 - DNA, 80 bp, synthetic construct; identical to SEQ ID NO: 15005
  source 1..80: mol_type = other DNA

SEQ ID NO: 57365 - DNA, 80 bp, synthetic construct
  source 1..80: mol_type = other DNA
ctatacaaagaaaattcacaagaacctaccaactattagaaataacaatttccttgccgggggcaaggagaatacacaaa

SEQ ID NO: 57366 - DNA, 80 bp, synthetic construct
  source 1..80: mol_type = other DNA
aataacaatttccttgccgggggcaaggagaatacacaaacatcaatatccttacaccacagcaataaacagataaaaga

SEQ ID NO: 57367 - DNA, 80 bp, synthetic construct
  source 1..80: mol_type = other DNA
aggcacctgtagtcccagcaactggggaggttgaggaaggagaatggcgtgaactcagtaggcggagcttgcagtgagcc

SEQ ID NO: 57368 - DNA, 80 bp, synthetic construct; identical to SEQ ID NO: 15006
  source 1..80: mol_type = other DNA

SEQ ID NO: 57369 - DNA, 80 bp, synthetic construct
  source 1..80: mol_type = other DNA
gctcactgcaagctccacctcccaggttcaagtgattctcctggctcagcctcctgagtagctgggactacaggtgcgca

SEQ ID NO: 57370 - DNA, 80 bp, synthetic construct
  source 1..80: mol_type = other DNA
tatggaagagtaaatggccaagaaaaaacaaaacttgaagcagaagaatatgagatcccttgcctaaccatatgtcacaa

SEQ ID NO: 57371 - DNA, 80 bp, synthetic construct
  source 1..80: mol_type = other DNA
tttgttggagatggggtctggtgggaggtgattggatcatggaaatggatttcccactgggtgcagttctcatgatagta

SEQ ID NO: 57372 - DNA, 80 bp, synthetic construct; identical to SEQ ID NO: 15007
  source 1..80: mol_type = other DNA

SEQ ID NO: 57373 - DNA, 80 bp, synthetic construct
  source 1..80: mol_type = other DNA
ttcaccttccaccatgattgtaagtttcctgaggcctccccagccatgcttcctatacagcctgtggaactatgagccaa

SEQ ID NO: 57374 - DNA, 80 bp, synthetic construct
  source 1..80: mol_type = other DNA
cacaaaaaataaattctacattacatcctacccagaagtaaatttcaggtagctagagtaaaaagcaaaactgaaaacta

SEQ ID NO: 57375 - DNA, 80 bp, synthetic construct
  source 1..80: mol_type = other DNA
cctttcatgatacaaattcttagcaaattaggtatagaaaaagtgtatctcaacacaataaagcccatatatgacaaacc

SEQ ID NO: 57376 - DNA, 80 bp, synthetic construct; identical to SEQ ID NO: 15008
  source 1..80: mol_type = other DNA

SEQ ID NO: 57377 - DNA, 80 bp, synthetic construct
  source 1..80: mol_type = other DNA
agcattactgtatactaataatgcaccaaccaaaaaagaaatcaagaaagcaatcacatttataatagcatcaaaaatat

SEQ ID NO: 57378 - DNA, 80 bp, synthetic construct
  source 1..80: mol_type = other DNA
gtagattccatccaacctctatcaaaattccaatgacattttcacagaaatagaaaaaaaatcctaagattcatatggaa

SEQ ID NO: 57379 - DNA, 80 bp, synthetic construct
  source 1..80: mol_type = other DNA
caaaaataaatccacacattttatggccaactgatcctttacaaatatgccaagaacatacaatggggaaaggacagtct

SEQ ID NO: 57380 - DNA, 80 bp, synthetic construct; identical to SEQ ID NO: 15009
  source 1..80: mol_type = other DNA

SEQ ID NO: 57381 - DNA, 80 bp, synthetic construct
  source 1..80: mol_type = other DNA
acttaaacataagatctgaaatggcggggtgcggtggcttacacctataatcccagcactttgggaggccaaggcaggtg

SEQ ID NO: 57382 - DNA, 80 bp, synthetic construct
  source 1..80: mol_type = other DNA
agtatttttacaatttcagatcttttttttgagatggagtctcgctctgttgctgggctggagtgcagtggcatgatctt

SEQ ID NO: 57383 - DNA, 80 bp, synthetic construct
  source 1..80: mol_type = other DNA
gaaacttaatagcaagagttgttgaaaaccaaaaatctgattttttttctttaagttggggtctcaccctgttgctcagg

SEQ ID NO: 57384 - DNA, 80 bp, synthetic construct; identical to SEQ ID NO: 15010
  source 1..80: mol_type = other DNA

SEQ ID NO: 57385 - DNA, 80 bp, synthetic construct
  source 1..80: mol_type = other DNA
cacctcatacctgctaagatggctctgataaaaaaaataaaaataaaccaagagattacaagtggtggcaaggatgtgga

SEQ ID NO: 57386 - DNA, 80 bp, synthetic construct
  source 1..80: mol_type = other DNA
tatctgtattcccaagttcactgcaccattattcacaatagccaagacatggaaacaacctaagtgtccatcaatgaata

SEQ ID NO: 57387 - DNA, 80 bp, synthetic construct
  source 1..80: mol_type = other DNA
tggaacctaaagagtcaaactcagccaggcatggtggcacgtgcctgtagtcccaactactcgggaggctgaggcaggag

SEQ ID NO: 57388 - DNA, 80 bp, synthetic construct; identical to SEQ ID NO: 15011
  source 1..80: mol_type = other DNA

SEQ ID NO: 57389 - DNA, 80 bp, synthetic construct
  source 1..80: mol_type = other DNA
gggcaacatggtgagaccccatctctaaaaaaaatagaaaaattagctgggcgcagtggctcatgcctgtaatcctagca

SEQ ID NO: 57390 - DNA, 80 bp, synthetic construct
  source 1..80: mol_type = other DNA
acttgagcctgggaggtccaggctgcagtgagctataatcttgccactgcactctagcctgggcgacagagcaagatcct

SEQ ID NO: 57391 - DNA, 80 bp, synthetic construct
  source 1..80: mol_type = other DNA
accatagatacaatttttatttgtcgactataaataaatgcacaagcaataaaggaaaatattgatacatatgaccacgt

SEQ ID NO: 57392 - DNA, 80 bp, synthetic construct
  source 1..80: mol_type = other DNA
caaaaaaattagctggacgtggtagtgggtgcctgtagtcccagctactcgggaggcttaggtaggagaatggcgtgaac

SEQ ID NO: 57393 - DNA, 80 bp, synthetic construct; identical to SEQ ID NO: 15012
  source 1..80: mol_type = other DNA

SEQ ID NO: 57394 - DNA, 80 bp, synthetic construct
  source 1..80: mol_type = other DNA
gggacaataggaatgcatatattttgtgttgaagtgtaaacagatacaacaaatttgaagagaattttggcaccagttaa

SEQ ID NO: 57395 - DNA, 80 bp, synthetic construct
  source 1..80: mol_type = other DNA
attgtcaagaagaagtggaaataagctaactgttgttaagtaaaatggataaataaagtatggtttgttcttataatggg

SEQ ID NO: 57396 - DNA, 80 bp, synthetic construct
  source 1..80: mol_type = other DNA
tacgcatgggaataattcccaacaactttagaatgataattactacaaggaaggagagaaatgggatgggcgttaaccga

SEQ ID NO: 57397 - DNA, 80 bp, synthetic construct; identical to SEQ ID NO: 15013
  source 1..80: mol_type = other DNA

SEQ ID NO: 57398 - DNA, 80 bp, synthetic construct
  source 1..80: mol_type = other DNA
ctcccagattaaagcgattctcctgcctcagcctcctgaatagctgggatcacaggcagccgccaccatgtccagctaat

SEQ ID NO: 57399 - DNA, 80 bp, synthetic construct
  source 1..80: mol_type = other DNA
gcccggctgatataaatcttaacagctacatgccccaatttcctcacctacaaaatgtgtgtattcaaagtgctacctaa

SEQ ID NO: 57400 - DNA, 80 bp, synthetic construct
  source 1..80: mol_type = other DNA
cttctaaaaatctcataagaaccttacttggcaacgaaagtgccccaaaactgagaagacccagactcttccttcaatga

SEQ ID NO: 57401 - DNA, 80 bp, synthetic construct
  source 1..80: mol_type = other DNA
gtccagcgttgccgcataggaattcagagctggcactgccgtgataaattgaaaatctcaatttttctgtaaaatcactc

SEQ ID NO: 57402 - DNA, 80 bp, synthetic construct; identical to SEQ ID NO: 15014
  source 1..80: mol_type = other DNA

SEQ ID NO: 57403 - DNA, 80 bp, synthetic construct
  source 1..80: mol_type = other DNA
gctgggattacaggcatgagccatcgcacccagctaatttttttagtttttgtagagagatggtctcactatgttgtcca

SEQ ID NO: 57404 - DNA, 80 bp, synthetic construct
  source 1..80: mol_type = other DNA
tattttaaatcaaacacatttagataaagctgactttttgcctgcttttttttgaaattttgggctgggcccagtagctc

SEQ ID NO: 57405 - DNA, 80 bp, synthetic construct
  source 1..80: mol_type = other DNA
aggctgaggtagaaggattgcctgagcctgggaggttgaggctgtagtgagccatgattgtgccactgcactccagcctg

SEQ ID NO: 57406 - DNA, 80 bp, synthetic construct; identical to SEQ ID NO: 15015
  source 1..80: mol_type = other DNA

SEQ ID NO: 57407 - DNA, 80 bp, synthetic construct
  source 1..80: mol_type = other DNA
gaggcaagagaatcacttgaaccctggaggcagagcttgcagtaaaccgagatcacgccactgcactctagcctaggtga

SEQ ID NO: 57408 - DNA, 80 bp, synthetic construct
  source 1..80: mol_type = other DNA
aactgtaagcagtgtttattatttataaattgctcagtgtaaggtattttgttatagcagtctgaatggactaagacaga

SEQ ID NO: 57409 - DNA, 80 bp, synthetic construct
  source 1..80: mol_type = other DNA
ggtggatcacaaagtcaggagatcaagaccatcctggctaacgcggtgaaaccccatctctactaaaaatgcaaaaaaat

SEQ ID NO: 57410 - DNA, 80 bp, synthetic construct; identical to SEQ ID NO: 15016
  source 1..80: mol_type = other DNA

SEQ ID NO: 57411 - DNA, 80 bp, synthetic construct
  source 1..80: mol_type = other DNA
ccctggtgaatactgaggatgattgtattcataatctcgtattcaatgtccatctattacaacataaagaatcaatatca

SEQ ID NO: 57412 - DNA, 80 bp, synthetic construct
  source 1..80: mol_type = other DNA
agttttttatccctcaccacccctcccaccacatgcatataaatttaacagtaataaggattgtttaatacagcaacatg

SEQ ID NO: 57413 - DNA, 80 bp, synthetic construct
  source 1..80: mol_type = other DNA
tcacttacatgtttccactgcttaaatcctccctacactccaaagcagtacatgcttcagaatccaggcagaggcacaac

SEQ ID NO: 57414 - DNA, 80 bp, synthetic construct; identical to SEQ ID NO: 15017
  source 1..80: mol_type = other DNA

SEQ ID NO: 57415 - DNA, 80 bp, synthetic construct
  source 1..80: mol_type = other DNA
aggagtttgagaccagcctggccaacatggtgaaaccccatctctactgaaaatacaaaaagtttgccgggtgtcgtggc

SEQ ID NO: 57416 - DNA, 80 bp, synthetic construct
  source 1..80: mol_type = other DNA
agtaatacctttgggacatccaagtagggatgccaggcaggaaggtggtcaaatctggagatttgaggcaagagataaat

SEQ ID NO: 57417 - DNA, 80 bp, synthetic construct
  source 1..80: mol_type = other DNA
ggtggaagagcagccgatggagggatgggaggaagccagaagaggccaaatcctggaggccaaaaaacgacagtgtttca

SEQ ID NO: 57418 - DNA, 80 bp, synthetic construct; identical to SEQ ID NO: 15018
  source 1..80: mol_type = other DNA

SEQ ID NO: 57419 - DNA, 80 bp, synthetic construct
  source 1..80: mol_type = other DNA
tttttttccaagacagggtctcacttcatcgcacagggtggagtgcagtgacctgatcatagctcatctcagcttcaaac

SEQ ID NO: 57420 - DNA, 80 bp, synthetic construct
  source 1..80: mol_type = other DNA
gcctcccaaagttctgggattacagacatgagccacagtgccaaggcctatatacgtctttgtgggcttgtttttagttt

SEQ ID NO: 57421 - DNA, 80 bp, synthetic construct
  source 1..80: mol_type = other DNA
ttgtatttttactatagatggggtttctccatgttggtcaggctggtcttgaacttccgacctcaggtgatccgcctgcc

SEQ ID NO: 57422 - DNA, 80 bp, synthetic construct; identical to SEQ ID NO: 15019
  source 1..80: mol_type = other DNA

SEQ ID NO: 57423 - DNA, 80 bp, synthetic construct
  source 1..80: mol_type = other DNA
ttgggaggctgaggcaggagaattgcttgaacccagtagggacaggttgcagtgagctgagattgcgccactgacctcca

SEQ ID NO: 57424 - DNA, 80 bp, synthetic construct
  source 1..80: mol_type = other DNA
tttaatttctttccttcctttcttctgtttttccttccttccttccttcctttctctctctcctccctttccttccttcc

SEQ ID NO: 57425 - DNA, 80 bp, synthetic construct
  source 1..80: mol_type = other DNA
taagtagctggaactactatttaggtgtgacccaccacacctgactaatttttgtatttttttttttttgtagagacagg

SEQ ID NO: 57426 - DNA, 80 bp, synthetic construct; identical to SEQ ID NO: 15020
  source 1..80: mol_type = other DNA

SEQ ID NO: 57427 - DNA, 80 bp, synthetic construct
  source 1..80: mol_type = other DNA
ccactaaacaattctgggagcctccttagagttcatgatcatgagtgaggagtgggaaccatttcctgattgtgtgattt

SEQ ID NO: 57428 - DNA, 80 bp, synthetic construct
  source 1..80: mol_type = other DNA
aaggggagttggcgacattgtccagagaggtgttgaaatgaagggttgtggagttgagctgaatagggaggggctcataa

SEQ ID NO: 57429 - DNA, 80 bp, synthetic construct
  source 1..80: mol_type = other DNA
cagggtatgacaatgagaatgtgtggccgagttggagaggagaagattcttggggattaagtggccaggttattgagagg

SEQ ID NO: 57430 - DNA, 80 bp, synthetic construct
  source 1..80: mol_type = other DNA
cagtagcagtgagaaaggaagaggaaagtttagcctaattgcagtgcctggaaggccgcgggttattttaaactagagtt

SEQ ID NO: 57431 - DNA, 80 bp, synthetic construct; identical to SEQ ID NO: 15021
  source 1..80: mol_type = other DNA

SEQ ID NO: 57432 - DNA, 80 bp, synthetic construct
  source 1..80: mol_type = other DNA
atttcacccagttagtttcttggaagctgtaaaaagtggcgtttaagaatgtagccttggccaggcacgatggcttatgc

SEQ ID NO: 57433 - DNA, 80 bp, synthetic construct
  source 1..80: mol_type = other DNA
gaggcaggagaattgcttgaacccgggaggcggaggttccagtgagccaagatcacgccactgcaccactccagcctggg

SEQ ID NO: 57434 - DNA, 80 bp, synthetic construct
  source 1..80: mol_type = other DNA
tacaaacattagccaggtgtggtggtatgcacctgtaatcccagctacttgggaagcttaggtaggaggatgacttgagc

SEQ ID NO: 57435 - DNA, 80 bp, synthetic construct; identical to SEQ ID NO: 15022
  source 1..80: mol_type = other DNA

SEQ ID NO: 57436 - DNA, 80 bp, synthetic construct
  source 1..80: mol_type = other DNA
ctcatgtagtcccagtgttggaggtggagcctggtgagaggtggttggattatgggagtggattctcacgaatggtttag

SEQ ID NO: 57437 - DNA, 80 bp, synthetic construct
  source 1..80: mol_type = other DNA
cagaaggcaagcagatgccagcatcatgcttcctgtagagcccacagaaccatgagccaattaaacctcttttttttttt

SEQ ID NO: 57438 - DNA, 80 bp, synthetic construct
  source 1..80: mol_type = other DNA
gacgggtttttgccatgttgcccaggctggtctcaaactcttgagctcaagtgattaaccctccggcctcagcctcccaa

SEQ ID NO: 57439 - DNA, 80 bp, synthetic construct
  source 1..80: mol_type = other DNA
gcttcagcctcccaagtagctgggattacaggtgctggccaccatgcccggctaatttttgtattcttagtagaaacggg

SEQ ID NO: 57440 - DNA, 80 bp, synthetic construct; identical to SEQ ID NO: 15023
  source 1..80: mol_type = other DNA

SEQ ID NO: 57441 - DNA, 80 bp, synthetic construct
  source 1..80: mol_type = other DNA
ttatatggagacactaaggactgcaacagacaagaagatctcagtgacaaacgggttatttagggcagcagccaactgac

SEQ ID NO: 57442 - DNA, 80 bp, synthetic construct
  source 1..80: mol_type = other DNA
aatgtacaaaatgtcaatgctaggaatgcagaatttctgcaaagaaaaccccccaaacccactgatcctaaaaacagggg

SEQ ID NO: 57443 - DNA, 80 bp, synthetic construct
  source 1..80: mol_type = other DNA
aagatgatcaaagaaatcttaaaggagatgcgctttgctgttacttgaagagggaatctgtgggccttccattaaagctt

SEQ ID NO: 57444 - DNA, 80 bp, synthetic construct
  source 1..80: mol_type = other DNA
gccaacatggcaaaacaccgtccctattaaaaatacaaacattagccgggcatggtggtgcatacctgtagttccagcta

SEQ ID NO: 57445 - DNA, 80 bp, synthetic construct; identical to SEQ ID NO: 15024
  source 1..80: mol_type = other DNA

SEQ ID NO: 57446 - DNA, 80 bp, synthetic construct
  source 1..80: mol_type = other DNA
acaggtgtacaccaccattcctggctaatttttttaaaaaaatttttgtaggccgggcatggtggctcacacctgtaatc

SEQ ID NO: 57447 - DNA, 80 bp, synthetic construct
  source 1..80: mol_type = other DNA
gtcgcttgaaccctggaggcggaggttgcagcgagccgagattgcaccactgcactccagcctgggcgacagagtgagat

SEQ ID NO: 57448 - DNA, 80 bp, synthetic construct
  source 1..80: mol_type = other DNA
aaggatgatgagttggtgctaaatgagctcagagaactttcagtgctcaacattgagaccaatgaggaatgttttgtttg

SEQ ID NO: 57449 - DNA, 80 bp, synthetic construct; identical to SEQ ID NO: 15025
  source 1..80: mol_type = other DNA

SEQ ID NO: 57450 - DNA, 80 bp, synthetic construct
  source 1..80: mol_type = other DNA
caagtcacagacacttctcagatgccaaacccaaaaggcgtggctgaattcatttgcatcaactcaggcaatgaatttgg

SEQ ID NO: 57451 - DNA, 80 bp, synthetic construct
  source 1..80: mol_type = other DNA
cggatgtaattaaagtcacaaattggtttatcttgaggtaatccaaagggagactgtgcaggagaggtctgactcaatca

SEQ ID NO: 57452 - DNA, 80 bp, synthetic construct
  source 1..80: mol_type = other DNA
gagtccgtggggccacagaaaaaagaactgcagaaaactcaggaataaaaatggagacagtgacacttccaagtaaaact

SEQ ID NO: 57453 - DNA, 80 bp, synthetic construct
  source 1..80: mol_type = other DNA
gcttgaccaggaaatccagtgttttcttgaaggatggaaaatctggagatgaagaatgggaatcatgtactgtcaaacgc

SEQ ID NO: 57454 - DNA, 80 bp, synthetic construct; identical to SEQ ID NO: 15026
  source 1..80: mol_type = other DNA

SEQ ID NO: 57455 - DNA, 80 bp, synthetic construct
  source 1..80: mol_type = other DNA
tacactgcaaggggtattttgtcactaacatttttttataattgctggtgcgcagtatcaataaaaagttggcttcaggc

SEQ ID NO: 57456 - DNA, 80 bp, synthetic construct
  source 1..80: mol_type = other DNA
aacacaaaaattagcctggcgtggtggtgtgtgcctgtaatgccagctacctgggaggctgaggcaggagaatcactgga

SEQ ID NO: 57457 - DNA, 80 bp, synthetic construct
  source 1..80: mol_type = other DNA
taaattctccacagacaatacaccttcttattacctgcacctggaacaaccatccccactccctgcccatggtaagctgc

SEQ ID NO: 57458 - DNA, 80 bp, synthetic construct; identical to SEQ ID NO: 15027
  source 1..80: mol_type = other DNA

SEQ ID NO: 57459 - DNA, 80 bp, synthetic construct
  source 1..80: mol_type = other DNA
ccccatctctactaaatatacaaaaaaatagctgggcatggtggtggatgcctgcaatcccacctacttgggaggctgag

SEQ ID NO: 57460 - DNA, 80 bp, synthetic construct
  source 1..80: mol_type = other DNA
caaaacaggaaatgacagcatcattagagatttaaggtttcttaactttttacgtctaggacaggttttggaagtctggt

SEQ ID NO: 57461 - DNA, 80 bp, synthetic construct
  source 1..80: mol_type = other DNA
atctagtggtgagtctaaccactaccactaactacaaagtaaccgtgagcatacatgacattttgaaatttctgcaacta

SEQ ID NO: 57462 - DNA, 80 bp, synthetic construct; identical to SEQ ID NO: 15028
  source 1..80: mol_type = other DNA

SEQ ID NO: 57463 - DNA, 80 bp, synthetic construct
  source 1..80: mol_type = other DNA
agagagagaaggaaggaaggagaaagaaagagaagaaagaagaaaggagggagggagggaaggagggaggaaggaaggaa

SEQ ID NO: 57464 - DNA, 80 bp, synthetic construct
  source 1..80: mol_type = other DNA
agaaaccccatctctactaaaaatacaaaattagctgggcatggtggcacatgcctgtaatcccagctactcgggaggct

SEQ ID NO: 57465 - DNA, 80 bp, synthetic construct
  source 1..80: mol_type = other DNA
aagaaagaaagaaagaaagaaagaaagaagaaagaaagaaagaaagaaagaaagaaggaaaatagctctgcatgagagcc

SEQ ID NO: 57466 - DNA, 80 bp, synthetic construct; identical to SEQ ID NO: 15029
  source 1..80: mol_type = other DNA

SEQ ID NO: 57467 - DNA, 80 bp, synthetic construct
  source 1..80: mol_type = other DNA
taattgtcctttcagctcagctatatcatcagtcccaaggcagacgttcagaagattcttttctagttcatagggaaaat

SEQ ID NO: 57468 - DNA, 80 bp, synthetic construct
  source 1..80: mol_type = other DNA
gagaggaaactaacattttctaaggacttattccataccaggggctgcacattctgtgtcttatatctattacaaactgt

SEQ ID NO: 57469 - DNA, 80 bp, synthetic construct
  source 1..80: mol_type = other DNA
agcctccggagtagctgggattactggcatgcaccaccacacccagctaatttttgtatttttggtagagacagagtttc

SEQ ID NO: 57470 - DNA, 80 bp, synthetic construct; identical to SEQ ID NO: 15030
  source 1..80: mol_type = other DNA

SEQ ID NO: 57471 - DNA, 80 bp, synthetic construct
  source 1..80: mol_type = other DNA
tagttgggattacaggcacctgccaccatgcctggctaatttttgtatttttagtagggacagggttttgccatgttggc

SEQ ID NO: 57472 - DNA, 80 bp, synthetic construct
  source 1..80: mol_type = other DNA
ttttgccatgttggccaggctggtctcaaattcctgacctcaggtgatccacctgcctcagcctcccaaagtgttaggat

SEQ ID NO: 57473 - DNA, 80 bp, synthetic construct
  source 1..80: mol_type = other DNA
tcagcctctcgagtagctgagattacaggtatgtgccaccatgcctagctgattttttatatttttagtagagatggggt

SEQ ID NO: 57474 - DNA, 80 bp, synthetic construct; identical to SEQ ID NO: 15031
  source 1..80: mol_type = other DNA

SEQ ID NO: 57475 - DNA, 80 bp, synthetic construct
  source 1..80: mol_type = other DNA
cagtaaactgtgatcatgccactgcattccagcctgggtaactgagcaagactctgtctcaaaaaactaaaaactaggca

SEQ ID NO: 57476 - DNA, 80 bp, synthetic construct
  source 1..80: mol_type = other DNA
gtaatcccagctactcagtaggctaagccaggggaatcgcttgaacccgggaggcagaggttgcagtgagccgagatggt

SEQ ID NO: 57477 - DNA, 80 bp, synthetic construct
  source 1..80: mol_type = other DNA
tttttaagctgtgttcttataaacttccaaatgagatgaagataaacttctgctgagaggggcatggtcatgacttacag

SEQ ID NO: 57478 - DNA, 80 bp, synthetic construct; identical to SEQ ID NO: 15032
  source 1..80: mol_type = other DNA

SEQ ID NO: 57479 - DNA, 80 bp, synthetic construct
  source 1..80: mol_type = other DNA
ggcacgtgtacatttgttggattttgcagcctggcatctatatcccatttgtctggtggcaagatcccatttttgcgttg

SEQ ID NO: 57480 - DNA, 80 bp, synthetic construct
  source 1..80: mol_type = other DNA
atgctggaactatcctggcttctgtcctttccaaagaccgcctgttcagcttttccttcagttctgtaaatattttttca

SEQ ID NO: 57481 - DNA, 80 bp, synthetic construct
  source 1..80: mol_type = other DNA
aagctcattacctgaaacaggaagaacacctcctcataaggctggtatgtgaattcaattagatgaaatatgtgctctcc

SEQ ID NO: 57482 - DNA, 80 bp, synthetic construct; identical to SEQ ID NO: 15033
  source 1..80: mol_type = other DNA

SEQ ID NO: 57483 - DNA, 80 bp, synthetic construct
  source 1..80: mol_type = other DNA
ggccaccatgcttggctttttgcttttttttttttttttttttggtagagatgggtctccctatgttgcccaggctagtc

SEQ ID NO: 57484 - DNA, 80 bp, synthetic construct
  source 1..80: mol_type = other DNA
cacccaggctggagtgcagtggccatctcggctcattacaacctccgcctcccaggttcaagcgactctcctgactcagc

SEQ ID NO: 57485 - DNA, 80 bp, synthetic construct
  source 1..80: mol_type = other DNA
gtcagccacctcgccaggctgcttgatatcttaaaatcagaaaagccacccatcttaagtggagggtgggtgggtccata

SEQ ID NO: 57486 - DNA, 80 bp, synthetic construct; identical to SEQ ID NO: 15034
  source 1..80: mol_type = other DNA

SEQ ID NO: 57487 - DNA, 80 bp, synthetic construct
  source 1..80: mol_type = other DNA
actccagatgcttctgagtctgtgaggcccctgtgtccgtcatcagcaaaacaagtgagggagaagtttgaggagtgatg

SEQ ID NO: 57488 - DNA, 80 bp, synthetic construct
  source 1..80: mol_type = other DNA
gcagaggctgcgcgggggtttgagcggagcgagaacagctccttcccttgatcatgctgccctccggaggtcagtttagg

SEQ ID NO: 57489 - DNA, 80 bp, synthetic construct
  source 1..80: mol_type = other DNA
tccggaatcacgagtctccagagctgtcccttcgccccacggctcacattccaggtctgcccctcagtgacttctgcaac

SEQ ID NO: 57490 - DNA, 80 bp, synthetic construct; identical to SEQ ID NO: 15035
  source 1..80: mol_type = other DNA

SEQ ID NO: 57491 - DNA, 80 bp, synthetic construct
  source 1..80: mol_type = other DNA
gagctcgcggcccctcagagcctggcacatcgccgcctggcatccggcaggcgtgagggaacgcatagcgcagcgagtca

SEQ ID NO: 57492 - DNA, 80 bp, synthetic construct
  source 1..80: mol_type = other DNA
tctcaggcgcaaacacgttcaaagtcgctaggccaaagcgctgagatacggtttcccaagccaattagagagcggctctc

SEQ ID NO: 57493 - DNA, 80 bp, synthetic construct
  source 1..80: mol_type = other DNA
agtcacagacccactcaggacacctcccgttgccgacgggctagacctgcatccgaagggcctaagcggggaggaaccgc

SEQ ID NO: 57494 - DNA, 80 bp, synthetic construct; identical to SEQ ID NO: 15036
  source 1..80: mol_type = other DNA

SEQ ID NO: 57495 - DNA, 80 bp, synthetic construct
  source 1..80: mol_type = other DNA
cccttgggacagtgtctggggctgcgcggcctggttctcatcccttgcagcatctgctattttagccaggggccaccttc

SEQ ID NO: 57496 - DNA, 80 bp, synthetic construct
  source 1..80: mol_type = other DNA
ctaaatatttattttctgcagactgacttcggagtaattcttgagccaggaggggagaggttagtgttcaaattgctgag

SEQ ID NO: 57497 - DNA, 80 bp, synthetic construct
  source 1..80: mol_type = other DNA
ggggaagaaacaagccttgggtgtatgggagcaggaaaggagggtgacagactggagaaatgataaaggccattttggaa

SEQ ID NO: 57498 - DNA, 80 bp, synthetic construct; identical to SEQ ID NO: 15037
  source 1..80: mol_type = other DNA

SEQ ID NO: 57499 - DNA, 80 bp, synthetic construct
  source 1..80: mol_type = other DNA
atcagctgggtcagcgctccctggtcaaagaaagtcattgagggatcaaaccgtaaaatggtgctaatagtgatgattaa

SEQ ID NO: 57500 - DNA, 80 bp, synthetic construct
  source 1..80: mol_type = other DNA
ggcaggcacctgtaatcccagctacttgggaggctgaggcaggaaaatcacttgaacctgggaggcagaggttgcagtga

SEQ ID NO: 57501 - DNA, 80 bp, synthetic construct
  source 1..80: mol_type = other DNA
gcccagcaaaaagatggggaaaataattaatgatgggggatctgagtggggcctgggacttgcaggtcacctgaatgata

SEQ ID NO: 57502 - DNA, 80 bp, synthetic construct; identical to SEQ ID NO: 15038
  source 1..80: mol_type = other DNA

SEQ ID NO: 57503 - DNA, 80 bp, synthetic construct
  source 1..80: mol_type = other DNA
actaaacccccaaaagggggagacagcaactcttcaatgaattcctggaaagacacaaacacatatacacaggtgtcctg

SEQ ID NO: 57504 - DNA, 80 bp, synthetic construct
  source 1..80: mol_type = other DNA
attttggcccatacagttcccctggttaagatcaaacaatgaactcaaagatcactagacacaaaagaagggcagctacc

SEQ ID NO: 57505 - DNA, 80 bp, synthetic construct
  source 1..80: mol_type = other DNA
cacctgaggtcaggagttcaagaccagcctggccaacatgatgaaaccccatctctactaaaaatacaaaaattagctgg

SEQ ID NO: 57506 - DNA, 80 bp, synthetic construct; identical to SEQ ID NO: 15039
  source 1..80: mol_type = other DNA

SEQ ID NO: 57507 - DNA, 80 bp, synthetic construct
  source 1..80: mol_type = other DNA
tggctactaacatcacaaagagagccaagaagacattatgtgcttcctgatggaaatacataccactacctctcaaatat

SEQ ID NO: 57508 - DNA, 80 bp, synthetic construct
  source 1..80: mol_type = other DNA
actcagtttcttccaaaaataaattgcagaggagatggaagggaaatctatagactaaaaaaagacacatatatggactt

SEQ ID NO: 57509 - DNA, 80 bp, synthetic construct
  source 1..80: mol_type = other DNA
aaaaatacaaaaattagctgggcgtggtggtgggtgtctataatcccagctactcaggagactgaggcaggagaattgct

SEQ ID NO: 57510 - DNA, 80 bp, synthetic construct; identical to SEQ ID NO: 15040
  source 1..80: mol_type = other DNA

SEQ ID NO: 57511 - DNA, 80 bp, synthetic construct
  source 1..80: mol_type = other DNA
tcatctgtatatgtataagatttaattcaaagtaactgggggacacagaaggaggataagcaataggtgttggtatagat

SEQ ID NO: 57512 - DNA, 80 bp, synthetic construct
  source 1..80: mol_type = other DNA
tgtaaaagggagattcaaacaaaaaaactcataaaagcaaacaacccagacagaaagatctggtaagaagaaagtgaaat

SEQ ID NO: 57513 - DNA, 80 bp, synthetic construct
  source 1..80: mol_type = other DNA
tgggcgacagagcagcaacttgtctcagtaaataaataaataaataaataaataaaaattgtatcttttctattcttccc

SEQ ID NO: 57514 - DNA, 80 bp, synthetic construct; identical to SEQ ID NO: 15041
  source 1..80: mol_type = other DNA

SEQ ID NO: 57515 - DNA, 80 bp, synthetic construct
  source 1..80: mol_type = other DNA
agtggcacaatcacagctcactacaacctcaactttcctggctcagtgattatcccacctcagcctcctgagtagctggg

SEQ ID NO: 57516 - DNA, 80 bp, synthetic construct
  source 1..80: mol_type = other DNA
tggcctgtgctgggattacaggtgtgagccaccgtgctggcctcagtactattttttattgattatatgttgaaataata

SEQ ID NO: 57517 - DNA, 80 bp, synthetic construct
  source 1..80: mol_type = other DNA
tataggagtactggtctggacttagatgaactttaagctttctataacgcaaaagagaacaccttgatagcagaggagtg

SEQ ID NO: 57518 - DNA, 80 bp, synthetic construct
  source 1..80: mol_type = other DNA
agtgacaaatcccagctgctctcagcagaaacaactggtttaagtgcatctttgtgggtgccttaatctcctgcaatgat

SEQ ID NO: 57519 - DNA, 80 bp, synthetic construct; identical to SEQ ID NO: 15042
  source 1..80: mol_type = other DNA

SEQ ID NO: 57520 - DNA, 80 bp, synthetic construct
  source 1..80: mol_type = other DNA
cctgggagacagagggagactctgtctaaaaaaaaaaaaaaaaaaaagaaatggagtctcactatgttgcccaggcagat

SEQ ID NO: 57521 - DNA, 80 bp, synthetic construct
  source 1..80: mol_type = other DNA
aaagggttctcactatcacctttctgttcaacttctaaacatcatcctgggagtgttagccagtagaataagaaatcaaa

SEQ ID NO: 57522 - DNA, 80 bp, synthetic construct
  source 1..80: mol_type = other DNA
aaaattggaggaggaggccaggtggagtggctcacatctgtaatcccagtttagtgagacactacaaaaaattaaatttt

SEQ ID NO: 57523 - DNA, 80 bp, synthetic construct; identical to SEQ ID NO: 15043
  source 1..80: mol_type = other DNA

SEQ ID NO: 57524 - DNA, 80 bp, synthetic construct
  source 1..80: mol_type = other DNA
aaaattagctgggtgtggtggcacatgcctgtaatcctagctactcaggaggctgaggcaggagaatcacttgaacccag

SEQ ID NO: 57525 - DNA, 80 bp, synthetic construct
  source 1..80: mol_type = other DNA
aaatagatccctacctcacatcacacacaaaaattaattccaagtaaatttgagacttaaaggtaacaaaaaaattctct

SEQ ID NO: 57526 - DNA, 80 bp, synthetic construct
  source 1..80: mol_type = other DNA
tacaggtgtgtgccactatgcttggctaatatatttttttaattttttgtagagatgaggtctcactatactgcctaggc

SEQ ID NO: 57527 - DNA, 80 bp, synthetic construct
  source 1..80: mol_type = other DNA
tttttttttttaaacggagtctcactctatcaccagtctggagtgcagtggcacgatcttggctcactgcatcctccacc

SEQ ID NO: 57528 - DNA, 80 bp, synthetic construct; identical to SEQ ID NO: 15044
  source 1..80: mol_type = other DNA

SEQ ID NO: 57529 - DNA, 80 bp, synthetic construct
  source 1..80: mol_type = other DNA
acctgtagtcctagttacttgggaggctgagggaggagggttgcctgagcccaggaggttgaggctacagtgagccatga

SEQ ID NO: 57530 - DNA, 80 bp, synthetic construct
  source 1..80: mol_type = other DNA
ctgtaatcccagcattttgggaggctgaggcggatggatcacctgaggtcaggcgttcaagactggcctggccaacatgg

SEQ ID NO: 57531 - DNA, 80 bp, synthetic construct
  source 1..80: mol_type = other DNA
atgagtgaaactccatctcaaaaaaaaaaaaaaaaaggtgcaaggatttcttgagcccaggagcctgggcaacacagaaa

SEQ ID NO: 57532 - DNA, 80 bp, synthetic construct
  source 1..80: mol_type = other DNA
agagtcacgctctgtaactgaggctggagtgcagtggcataatcttggctcactgcaacctccgcctcccaggttcagcg

SEQ ID NO: 57533 - DNA, 80 bp, synthetic construct; identical to SEQ ID NO: 15045
  source 1..80: mol_type = other DNA

SEQ ID NO: 57534 - DNA, 80 bp, synthetic construct
  source 1..80: mol_type = other DNA
gagtactgtaaacagttgcaatggcggccctgaccagctagtgagactcgcatttattcagtaaagattaattgacaaag

SEQ ID NO: 57535 - DNA, 80 bp, synthetic construct
  source 1..80: mol_type = other DNA
ttaactaaaggtaaagatcaggtcgccttcaaccatatctattactgaagttatgcaaactcttaggccttccaagaggg

SEQ ID NO: 57536 - DNA, 80 bp, synthetic construct
  source 1..80: mol_type = other DNA
aatccaaaatgctccaaaatccggaagtttttgagtatcaacatgatgctcaaaggtaatgctctttggagcatttcaga

SEQ ID NO: 57537 - DNA, 80 bp, synthetic construct; identical to SEQ ID NO: 15046
  source 1..80: mol_type = other DNA

SEQ ID NO: 57538 - DNA, 80 bp, synthetic construct
  source 1..80: mol_type = other DNA
ggaaacaatccatttatagaatatgtttaatcacacaagtcatatatggcagtgaaaaggaatgagctatagccatatgc

SEQ ID NO: 57539 - DNA, 80 bp, synthetic construct
  source 1..80: mol_type = other DNA
tcatgatcatggctcgctgtaatctcgaactcctggatttcaaagtggtcctctcgcctttgtctcccaaatagctagaa

SEQ ID NO: 57540 - DNA, 80 bp, synthetic construct
  source 1..80: mol_type = other DNA
ttttgttttttaatgatataaacactcacaaacacaccacacaatccaagtagcagcagcttggcaaaagtcaccatcaa

SEQ ID NO: 57541 - DNA, 80 bp, synthetic construct
  source 1..80: mol_type = other DNA
taaaagtaaagctatatatatgccaaaacaaaaattcgttgttttccagtgtcattaaaaacagaatctaggccgggtgc

SEQ ID NO: 57542 - DNA, 80 bp, synthetic construct; identical to SEQ ID NO: 15047
  source 1..80: mol_type = other DNA

SEQ ID NO: 57543 - DNA, 80 bp, synthetic construct
  source 1..80: mol_type = other DNA
gtaaactcatttttggtaaaagtgccaagaacatacactggggaaaagatagtctcttggtcaggcacggtagctcacgc

SEQ ID NO: 57544 - DNA, 80 bp, synthetic construct
  source 1..80: mol_type = other DNA
gaggcaggagaatcacttgaaccaaggaggcagaggttgcagtgagccaatactgcaccactgcactccagcctaggtga

SEQ ID NO: 57545 - DNA, 80 bp, synthetic construct
  source 1..80: mol_type = other DNA
accaaattatgaaactactacaagaaaacactggggaaaatctccaagacacgggtctgggcaaaaatttcttgagccat

SEQ ID NO: 57546 - DNA, 80 bp, synthetic construct
  source 1..80: mol_type = other DNA
ctgaccaacatggtgaaaccccatctctactaaaaatacaaaattagccaggcatggtggcacatgcctgtaatcacagc

SEQ ID NO: 57547 - DNA, 80 bp, synthetic construct; identical to SEQ ID NO: 15048
  source 1..80: mol_type = other DNA

SEQ ID NO: 57548 - DNA, 80 bp, synthetic construct
  source 1..80: mol_type = other DNA
tcactccagtcagaatggcttttatccaaaagacaggcaatagcaatgctggcaaggatgtggagaaaagggaaccctta

SEQ ID NO: 57549 - DNA, 80 bp, synthetic construct
  source 1..80: mol_type = other DNA
tcccatgtttgttgcagtattgttcacaatagctaagatttggaagcaacctaagtgtccatcaacagatgaatgggtaa

SEQ ID NO: 57550 - DNA, 80 bp, synthetic construct
  source 1..80: mol_type = other DNA
aatctaaaaatcaaaacaattgaactcatgtactcatgtacgaagagagtagaaggatggctaccagaggctgggaaggc

SEQ ID NO: 57551 - DNA, 80 bp, synthetic construct; identical to SEQ ID NO: 15049
  source 1..80: mol_type = other DNA

SEQ ID NO: 57552 - DNA, 80 bp, synthetic construct
  source 1..80: mol_type = other DNA
aagacaaaataaaataaaatagaccaataatgacagtatgttgtgaatcaagagttacagtaattccgcatacctgagat

SEQ ID NO: 57553 - DNA, 80 bp, synthetic construct
  source 1..80: mol_type = other DNA
tgctgtcatctgcagcccgctcctaagggaagacaaagggaaatgtctagtttggggaaagcagtccttcacttcaggat

SEQ ID NO: 57554 - DNA, 80 bp, synthetic construct
  source 1..80: mol_type = other DNA
ttaccatcagcacacccagcatcatgtcatagttgttgatcagaaacacaagctgctccttccttgaggagaactcagct

SEQ ID NO: 57555 - DNA, 80 bp, synthetic construct; identical to SEQ ID NO: 15050
  source 1..80: mol_type = other DNA

SEQ ID NO: 57556 - DNA, 80 bp, synthetic construct
  source 1..80: mol_type = other DNA
caccaccctcccagaacacctgctcatagcgtggcccatgacacaactgtgaccttggccaacccccacaatgatgctta

SEQ ID NO: 57557 - DNA, 80 bp, synthetic construct
  source 1..80: mol_type = other DNA
ggatcagttcaaaccgtggccatagcaaggcaagcacctgttcccagtacctgtgggcttaatcagaatcagaggtcagc

SEQ ID NO: 57558 - DNA, 80 bp, synthetic construct
  source 1..80: mol_type = other DNA
actgcctccggagcaaatgaatgggaataaaggttgatgataccaggtcagtaggagtctaaggtcagggcagagtcatg

SEQ ID NO: 57559 - DNA, 80 bp, synthetic construct; identical to SEQ ID NO: 15051
  source 1..80: mol_type = other DNA

SEQ ID NO: 57560 - DNA, 80 bp, synthetic construct
  source 1..80: mol_type = other DNA
agtggcacaatctcggctcactgcaacctccgcctgcctcccaggttcaagcaattctcctgcctcagcctcctgagtag

SEQ ID NO: 57561 - DNA, 80 bp, synthetic construct
  source 1..80: mol_type = other DNA
acccggtgttttcggctttagagacaggttgttttgtcacctaggctggattgtaatggtacaatcatagttcactgcag

SEQ ID NO: 57562 - DNA, 80 bp, synthetic construct
  source 1..80: mol_type = other DNA
gcaaccttcctgccttggtctcccaaagtactgggattgcaggcataagccactgcacctggccacaccaggatctatga

SEQ ID NO: 57563 - DNA, 80 bp, synthetic construct; identical to SEQ ID NO: 15052
  source 1..80: mol_type = other DNA

SEQ ID NO: 57564 - DNA, 80 bp, synthetic construct
  source 1..80: mol_type = other DNA
aggccgcgcacacctggctaatttttgtactgttagtagagacagggtttcatcatgttggtcaggctggtctcaaactc

SEQ ID NO: 57565 - DNA, 80 bp, synthetic construct
  source 1..80: mol_type = other DNA
tccacctcagcatctttagtagctgtgaccacaggcacacatcaacacacacccggctaatttttcattttttgtagaga

SEQ ID NO: 57566 - DNA, 80 bp, synthetic construct
  source 1..80: mol_type = other DNA
gaccccactatgctgctgatgaagactggggacaaaggtgttgaatggtacaggaaacaggagtcttaccagggtcatgc

SEQ ID NO: 57567 - DNA, 80 bp, synthetic construct; identical to SEQ ID NO: 15053
  source 1..80: mol_type = other DNA

SEQ ID NO: 57568 - DNA, 80 bp, synthetic construct
  source 1..80: mol_type = other DNA
attcccctcatccagtctctcccctctgcatgcccttaagtcaatggttcccagctcttttcacatcacagcaggctgga

SEQ ID NO: 57569 - DNA, 80 bp, synthetic construct
  source 1..80: mol_type = other DNA
ctgtgtgaggcaccaggatgggggcctcaagttcagtgggggagatgacagagccgcgggttcctagggtgaaaatggtg

SEQ ID NO: 57570 - DNA, 80 bp, synthetic construct
  source 1..80: mol_type = other DNA
gtgctgacatctgtgaatgggcttcagggtgtctctccctcccttgcaatcatatgcaaaactatgtgtcaaaataatgt

SEQ ID NO: 57571 - DNA, 80 bp, synthetic construct; identical to SEQ ID NO: 15054
  source 1..80: mol_type = other DNA

SEQ ID NO: 57572 - DNA, 80 bp, synthetic construct
  source 1..80: mol_type = other DNA
ggtaagagcggtagtaagacaggtaaatcttgctcagcgtctccacatattcatccctgatctcctttgctgttgctcgt

SEQ ID NO: 57573 - DNA, 80 bp, synthetic construct
  source 1..80: mol_type = other DNA
ctgggggatctgatagttggtcatgggtttcctgaaggaataaatcttctggaggataaactctcggatcttcgtcactg

SEQ ID NO: 57574 - DNA, 80 bp, synthetic construct
  source 1..80: mol_type = other DNA
ggtaaacataggcagaagggtggtgaatatctctttggtatttctcaagattttcagggaaacccagagagacaagaatg

SEQ ID NO: 57575 - DNA, 80 bp, synthetic construct
  source 1..80: mol_type = other DNA
tgacatctgcgcaggctgctgtgcctctagcttcctgctctctgactgcggctgccttggcatccagctcctgtagctgc

SEQ ID NO: 57576 - DNA, 80 bp, synthetic construct; identical to SEQ ID NO: 15055
  source 1..80: mol_type = other DNA

SEQ ID NO: 57577 - DNA, 80 bp, synthetic construct
  source 1..80: mol_type = other DNA
actcacgtgaccagagcagaaggcaccaccagaccatcaacaagctccccaagtttcccccgaactgcctggcgatttcg

SEQ ID NO: 57578 - DNA, 80 bp, synthetic construct
  source 1..80: mol_type = other DNA
accaaagactctttgtgaagtcttcagtatttatcagtccttgagggtggcagatgatgagacaccccagattatcagga

SEQ ID NO: 57579 - DNA, 80 bp, synthetic construct
  source 1..80: mol_type = other DNA
acctccaggacagcatcacaggctgtgatctggttgtgtagagatgctatattctcactctcttgaatatctgatccaca

SEQ ID NO: 57580 - DNA, 80 bp, synthetic construct; identical to SEQ ID NO: 15056
  source 1..80: mol_type = other DNA

SEQ ID NO: 57581 - DNA, 80 bp, synthetic construct
  source 1..80: mol_type = other DNA
caagagactgttgtttttccttttggggtagaatagatagaagggcagattagtacaggggaaagcctcaccgttttaag

SEQ ID NO: 57582 - DNA, 80 bp, synthetic construct
  source 1..80: mol_type = other DNA
ggtactgcacccaccccatgccatcgcttaccatccacttcatccaggatgaattcatcagaagtgatatccaactcccc

SEQ ID NO: 57583 - DNA, 80 bp, synthetic construct
  source 1..80: mol_type = other DNA
tgaaaaattctaagagtctcacgttgtacccactctcctattttgtgctgatgggtaaggaatacgacaaggagtgagac

SEQ ID NO: 57584 - DNA, 80 bp, synthetic construct; identical to SEQ ID NO: 15057
  source 1..80: mol_type = other DNA

SEQ ID NO: 57585 - DNA, 80 bp, synthetic construct
  source 1..80: mol_type = other DNA
ggttgaggcaggagaatggcgtgaacccggaaggtggagcttgcagtgagccaagatcgcgccactgcactccagcctgg

SEQ ID NO: 57586 - DNA, 80 bp, synthetic construct
  source 1..80: mol_type = other DNA
tctggggaaccccaggctttctagaaatgtcaaaacacatagtgtttacctgcatgccaggtgcaatcttacacatattc

SEQ ID NO: 57587 - DNA, 80 bp, synthetic construct
  source 1..80: mol_type = other DNA
taacctttacactatactacttcgtgactctaccccaaaatgtggagtgaagttgaaattttgtgccccagaacatgagt

SEQ ID NO: 57588 - DNA, 80 bp, synthetic construct; identical to SEQ ID NO: 15058
  source 1..80: mol_type = other DNA

SEQ ID NO: 57589 - DNA, 80 bp, synthetic construct
  source 1..80: mol_type = other DNA
aatcgttcccagatatttgagttaagttgtttgactccagctgtcccctttcagctctaaccacttcacccaactgcaaa

SEQ ID NO: 57590 - DNA, 80 bp, synthetic construct
  source 1..80: mol_type = other DNA
cacttctcctagatcgcaccgcctcttcctcctggaagctatataatgatatcgcgtcacttccgctctctcttccacag

SEQ ID NO: 57591 - DNA, 80 bp, synthetic construct
  source 1..80: mol_type = other DNA
gtccctggaaagggacaccaaagatttccaattccggagagcgggcccgaggaagggtcactgctcgggcgcacgaaagc

SEQ ID NO: 57592 - DNA, 80 bp, synthetic construct; identical to SEQ ID NO: 15059
  source 1..80: mol_type = other DNA

SEQ ID NO: 57593 - DNA, 80 bp, synthetic construct
  source 1..80: mol_type = other DNA
gggcggcggaaaatagcctttgccatcactgccattaaggtaagtgaagtagggtaaggaatagggaatgtaaatgagaa

SEQ ID NO: 57594 - DNA, 80 bp, synthetic construct
  source 1..80: mol_type = other DNA
gcatttaccacagaaaataagtgattaaagccaagatagtggtctaaggtcaagccaaaacatttcacctggggaagtgg

SEQ ID NO: 57595 - DNA, 80 bp, synthetic construct
  source 1..80: mol_type = other DNA
cttgagggataagtagaaataccaacagataaaaagtgtgaagaagcctgtagatggagggtggaagaagtctgagtggg

SEQ ID NO: 57596 - DNA, 80 bp, synthetic construct; identical to SEQ ID NO: 15060
  source 1..80: mol_type = other DNA

SEQ ID NO: 57597 - DNA, 80 bp, synthetic construct
  source 1..80: mol_type = other DNA
gaaatactgtacttatttcagagaccggctgtgaggcttaagtagaggtgcagcattcataagtgtaatagagaataacc

SEQ ID NO: 57598 - DNA, 80 bp, synthetic construct
  source 1..80: mol_type = other DNA
caggagttcgagaccagcctggtcaacatggtgaaacctcgtcatttaattaataaatttgaaagaccctgctctcttct

SEQ ID NO: 57599 - DNA, 80 bp, synthetic construct
  source 1..80: mol_type = other DNA
cccaagtagctgagattacaggcacacgcccagctaatttttgtatttttagaagagatggggtttcaccatgttggtca

SEQ ID NO: 57600 - DNA, 80 bp, synthetic construct; identical to SEQ ID NO: 15061
  source 1..80: mol_type = other DNA

SEQ ID NO: 57601 - DNA, 80 bp, synthetic construct
  source 1..80: mol_type = other DNA
tttcctggagcctactgtaacaagttcatataaactaagcagaaaattactcttggcgctggaggcacttaagaatccta

SEQ ID NO: 57602 - DNA, 80 bp, synthetic construct
  source 1..80: mol_type = other DNA
tgtcattggatctagagcccaccctaatcaaatataacgtcattttacctaattatttccgtaacgaccttatttccaaa

SEQ ID NO: 57603 - DNA, 80 bp, synthetic construct
  source 1..80: mol_type = other DNA
ggtgttgatgtgatgctaccaatgtaagcattagtttctttttataataacttgggcagtcagttctgggcactgacaaa

SEQ ID NO: 57604 - DNA, 80 bp, synthetic construct; identical to SEQ ID NO: 15062
  source 1..80: mol_type = other DNA

SEQ ID NO: 57605 - DNA, 80 bp, synthetic construct
  source 1..80: mol_type = other DNA
tcctaggttcaagctattctgctgcagcctcccaagtagctgggattacaggcacctgccaccatgctcagcaacttttc

SEQ ID NO: 57606 - DNA, 80 bp, synthetic construct
  source 1..80: mol_type = other DNA
atctggaaaggtgggtgaggaaagggtgacctaggggattgcaaaatagattattgcagatcctacctttgtgagctttt

SEQ ID NO: 57607 - DNA, 80 bp, synthetic construct
  source 1..80: mol_type = other DNA
ggacaaggaagggggctgggggtggggtcagcctcagaaaggggtccatctagatctgaccttggtctgcctgccaggtg

SEQ ID NO: 57608 - DNA, 80 bp, synthetic construct; identical to SEQ ID NO: 15063
  source 1..80: mol_type = other DNA

SEQ ID NO: 57609 - DNA, 80 bp, synthetic construct
  source 1..80: mol_type = other DNA
gactcttctctttttacctgcagccttcgtgtccgaggccagcacaccaagaccactggccgccgtggccgcaccgtggg

SEQ ID NO: 57610 - DNA, 80 bp, synthetic construct
  source 1..80: mol_type = other DNA
tagttttagcagtggtgatgctgcagaccccccagtctccctatatgtagctagtgatgtccctctctgtaaagagaaat

SEQ ID NO: 57611 - DNA, 80 bp, synthetic construct
  source 1..80: mol_type = other DNA
tttttgtttttgttttcttttaaggggtcatctagtcataagggaaaatccttcgggctgtgaccgaagcaacaaaggca

SEQ ID NO: 57612 - DNA, 80 bp, synthetic construct; identical to SEQ ID NO: 15064
  source 1..80: mol_type = other DNA

SEQ ID NO: 57613 - DNA, 80 bp, synthetic construct
  source 1..80: mol_type = other DNA
gcgtggtcggttaagtccccggccgtgacccaggcccggggagctagtctccgcccttcgctcttacggatcccctcgga

SEQ ID NO: 57614 - DNA, 80 bp, synthetic construct
  source 1..80: mol_type = other DNA
ccctggccctgccccgcctcttgatccccaaccaggaagcttgcagtggtcccggggcccctcccttcctgctcatcctg

SEQ ID NO: 57615 - DNA, 80 bp, synthetic construct
  source 1..80: mol_type = other DNA
cggagtcagcagcccagggggatatcttgcaggccgccttccaggactcctaccgcaacctcaccctaaagaccctcagc

SEQ ID NO: 57616 - DNA, 80 bp, synthetic construct; identical to SEQ ID NO: 15065
  source 1..80: mol_type = other DNA

SEQ ID NO: 57617 - DNA, 80 bp, synthetic construct
  source 1..80: mol_type = other DNA
attctcaaggtggccagccgggcaccccttctcccattagaggatgtctttgtgggggtaagtgcccgacgaggaggcct

SEQ ID NO: 57618 - DNA, 80 bp, synthetic construct
  source 1..80: mol_type = other DNA
ttttgctcctggttccagggagtcctgggcatcctgcggtgtcgagcaatagcctggcttcagagctgagagtgcctggg

SEQ ID NO: 57619 - DNA, 80 bp, synthetic construct
  source 1..80: mol_type = other DNA
gtcatcgggaagagaaaaagaaaaaaatgctgcagttgttctctcaagctagggcagaagaggggtgtcaagctcctcaa

SEQ ID NO: 57620 - DNA, 80 bp, synthetic construct; identical to SEQ ID NO: 15066
  source 1..80: mol_type = other DNA

SEQ ID NO: 57621 - DNA, 80 bp, synthetic construct
  source 1..80: mol_type = other DNA
agggaacactcatttccctacaggtgatcttggggagagactgttcccaggcaaccctggagtctggctcagcgcacaaa

SEQ ID NO: 57622 - DNA, 80 bp, synthetic construct
  source 1..80: mol_type = other DNA
aggagggtgcagcctgtggaaggcccggcccatgccaatgctcatttaccctgtgttcctcatccatgaccttcctcttc

SEQ ID NO: 57623 - DNA, 80 bp, synthetic construct
  source 1..80: mol_type = other DNA
ttctggggacaagccatggtggggagaggatgtgggggagaagacgggcctgggcattcaggggcctgctccataccagc

SEQ ID NO: 57624 - DNA, 80 bp, synthetic construct; identical to SEQ ID NO: 15067
  source 1..80: mol_type = other DNA

SEQ ID NO: 57625 - DNA, 80 bp, synthetic construct
  source 1..80: mol_type = other DNA
ggaatctcaccctctccagcagagggaaacctgaccccgtccaggagaggggaatctcaccctctccaggaagaggaaac

SEQ ID NO: 57626 - DNA, 80 bp, synthetic construct
  source 1..80: mol_type = other DNA
ctccagcaggggagcctcaccttctctagcagggccttcacctcccactcctggcgctgcttccggcttctgtatggatt

SEQ ID NO: 57627 - DNA, 80 bp, synthetic construct
  source 1..80: mol_type = other DNA
atgtctctggcccaaacttccacccagagttcattcacttcaagccccatcccctggcccactcaccagggaccagcatg

SEQ ID NO: 57628 - DNA, 80 bp, synthetic construct; identical to SEQ ID NO: 15068
  source 1..80: mol_type = other DNA

SEQ ID NO: 57629 - DNA, 80 bp, synthetic construct
  source 1..80: mol_type = other DNA
taatagtaataaccactgccatcaccctgaacactccacaggcatcctctcagttaagctgcacacaactcatactattt

SEQ ID NO: 57630 - DNA, 80 bp, synthetic construct
  source 1..80: mol_type = other DNA
cacccaaatgtgatgtccccctgtacacacatgcagcacacagcccagcaaggggaaggagcatgtgcagtggtcagaaa

SEQ ID NO: 57631 - DNA, 80 bp, synthetic construct
  source 1..80: mol_type = other DNA
gaggtttgttaggattggtgggaaacatggtcaggaaaatcaggagcagacaatttgtgaggtttctttaaagtcagact

SEQ ID NO: 57632 - DNA, 80 bp, synthetic construct; identical to SEQ ID NO: 15069
  source 1..80: mol_type = other DNA

SEQ ID NO: 57633 - DNA, 80 bp, synthetic construct
  source 1..80: mol_type = other DNA
gccagggtttcgccatgttgaccacgctggtcttgaactcctggcctcaaatgacctgcccaccttggcctcccagagtg

SEQ ID NO: 57634 - DNA, 80 bp, synthetic construct
  source 1..80: mol_type = other DNA
cttatgagcagagacttgcacagtgatggagcccaagagaggaccagctggatacttccgacaagataatcagcgccctg

SEQ ID NO: 57635 - DNA, 80 bp, synthetic construct
  source 1..80: mol_type = other DNA
agtgccaaatgggagtctactgtactactagtaagcagcagttcggctttgagaagtcaacgcaatccaatcataataca

SEQ ID NO: 57636 - DNA, 80 bp, synthetic construct; identical to SEQ ID NO: 15070
  source 1..80: mol_type = other DNA

SEQ ID NO: 57637 - DNA, 80 bp, synthetic construct
  source 1..80: mol_type = other DNA
ttgggaggacaggcgggtggatcacaaggtcaggagttcaagaccagcctggccaacatggtgaaattccatctgtacta

SEQ ID NO: 57638 - DNA, 80 bp, synthetic construct
  source 1..80: mol_type = other DNA
caaaaaaaaaagatacaattatgcaaaaacagggagcgggtggtggggggggtggtcccagcatcctggagactttgaat

SEQ ID NO: 57639 - DNA, 80 bp, synthetic construct
  source 1..80: mol_type = other DNA
ttatccaggtgtggtggtgtgtacctgagtcaaattctgggtgacaggaaaattctgggagatgagagcaggtcaagaga

SEQ ID NO: 57640 - DNA, 80 bp, synthetic construct
  source 1..80: mol_type = other DNA
tcaggagtttgagaccagccaagccaacatggcaaaaccccatctctactaaaaatacaaaaattagcgcatgcagtggc

SEQ ID NO: 57641 - DNA, 80 bp, synthetic construct; identical to SEQ ID NO: 15071
  source 1..80: mol_type = other DNA

SEQ ID NO: 57642 - DNA, 80 bp, synthetic construct
  source 1..80: mol_type = other DNA
aatcccagctactcaggaggctgaggcaggagaatcgcttgaaccccggggggcagaggttgtggtgagctgagattgtg

SEQ ID NO: 57643 - DNA, 80 bp, synthetic construct
  source 1..80: mol_type = other DNA
cacagcaggtgcccagtgaatacctgatgacaaaaggaatcagaggaaaatacaaatcagacagaaaagctgtggaaaat

SEQ ID NO: 57644 - DNA, 80 bp, synthetic construct
  source 1..80: mol_type = other DNA
ttaatgtctacaacagcttatatgagggctttaaaccaaggcttggtaaactactgcccatgggccaaacctggcccatc

SEQ ID NO: 57645 - DNA, 80 bp, synthetic construct; identical to SEQ ID NO: 15072
  source 1..80: mol_type = other DNA

SEQ ID NO: 57646 - DNA, 80 bp, synthetic construct
  source 1..80: mol_type = other DNA
atctctacagatcagcatgaacatgaatatctacagtcaaatttgaccatctggaacactaactttgtacatcaattagg

SEQ ID NO: 57647 - DNA, 80 bp, synthetic construct
  source 1..80: mol_type = other DNA
gctagagtgcagtggcatgatcacagctcactgcagccttaacctcctgggctgaggtgggaggatcacctcagcctcct

SEQ ID NO: 57648 - DNA, 80 bp, synthetic construct; identical to SEQ ID NO: 15073
  source 1..80: mol_type = other DNA

SEQ ID NO: 57649 - DNA, 80 bp, synthetic construct
  source 1..80: mol_type = other DNA
ttggccaggctggtctcaaactcctgacctcaggcgatccacccgccttggcctccaaagtgctgggattacaggcgtga

SEQ ID NO: 57650 - DNA, 80 bp, synthetic construct
  source 1..80: mol_type = other DNA
ccgtctctacaaaaaaatacaaaattagctgggcatgatggcaggtgcctgtaatcccagctacttgggagactgaggca

SEQ ID NO: 57651 - DNA, 80 bp, synthetic construct
  source 1..80: mol_type = other DNA
aggctgaggcgggcagatcacttgaggtcaggaattcgagaccagcctgaacaacatgctgaaaccctgtctctactaaa

SEQ ID NO: 57652 - DNA, 80 bp, synthetic construct; identical to SEQ ID NO: 15074
  source 1..80: mol_type = other DNA

SEQ ID NO: 57653 - DNA, 80 bp, synthetic construct
  source 1..80: mol_type = other DNA
taaacctgggcatcctggctttagactctgtgctcctaaagcacactgccttccacacctttctgcccacctatgactcc

SEQ ID NO: 57654 - DNA, 80 bp, synthetic construct
  source 1..80: mol_type = other DNA
acacctaagcctgaggttactaaacatgggaaagatgggaactcaagaccaagagataacaaaaaagggaaataaaaggg

SEQ ID NO: 57655 - DNA, 80 bp, synthetic construct
  source 1..80: mol_type = other DNA
agagctgccacaatcttccccactgacacatccaggtaggttagaaaccctgtttctgactgagagagaaagacagagag

SEQ ID NO: 57656 - DNA, 80 bp, synthetic construct; identical to SEQ ID NO: 15075
  source 1..80: mol_type = other DNA

SEQ ID NO: 57657 - DNA, 80 bp, synthetic construct
  source 1..80: mol_type = other DNA
cgcacataagcttctttgttacccaatcaagggcagccacatgacctcggcgccctccaaaagccaggtgtctgttggag

SEQ ID NO: 57658 - DNA, 80 bp, synthetic construct
  source 1..80: mol_type = other DNA
ccaaacatacactgggaatggctgaagtggttaaggaaacacatcttagttcaagagtcactagaattcaaccttacctt

SEQ ID NO: 57659 - DNA, 80 bp, synthetic construct
  source 1..80: mol_type = other DNA
ctttacctcctcaggctcaccttggctgcacttgcaatgtccacagcctccacaatgtcagcctggcatatctttgctgt

SEQ ID NO: 57660 - DNA, 80 bp, synthetic construct; identical to SEQ ID NO: 15076
  source 1..80: mol_type = other DNA

SEQ ID NO: 57661 - DNA, 80 bp, synthetic construct
  source 1..80: mol_type = other DNA
cctcacctttcgggatttgtcaatgcgacagaacttctggaccacttccacagggacgggggcggggcctgggaatggat

SEQ ID NO: 57662 - DNA, 80 bp, synthetic construct
  source 1..80: mol_type = other DNA
gtttcttcgggacctgaggcttcttagagatccgagacttctttaagatgtaagcattttttggtctctgaggacggagc

SEQ ID NO: 57663 - DNA, 80 bp, synthetic construct
  source 1..80: mol_type = other DNA
agggaggcctctacctttctcttggtctgaagtttgtctttcttgggcgggacatccttgcccggcttgggggctgtctc

SEQ ID NO: 57664 - DNA, 80 bp, synthetic construct; identical to SEQ ID NO: 15077
  source 1..80: mol_type = other DNA

SEQ ID NO: 57665 - DNA, 80 bp, synthetic construct
  source 1..80: mol_type = other DNA
acttcccatcaagggtcagaaagaaacttccggcacagtcttttcccagcattccttgtttacttccgggtttattacta

SEQ ID NO: 57666 - DNA, 80 bp, synthetic construct
  source 1..80: mol_type = other DNA
gcccctcagggctacctctcaagagtgctatcatttccgcaggccagatcagaaaagggagctcaggtaccttccagaga

SEQ ID NO: 57667 - DNA, 80 bp, synthetic construct
  source 1..80: mol_type = other DNA
aacagggtcggtatggtctcgcccaatgcacttacaacccaaagccattaccgagataaggtttgttgccccatctgggc

SEQ ID NO: 57668 - DNA, 80 bp, synthetic construct
  source 1..80: mol_type = other DNA
ccccagacttaagtaaatccatgtcggggaggcagaaacttgaagcacaactaacagaaaataatatcgtgaaagaggtg

SEQ ID NO: 57669 - DNA, 80 bp, synthetic construct; identical to SEQ ID NO: 15078
  source 1..80: mol_type = other DNA

SEQ ID NO: 57670 - DNA, 80 bp, synthetic construct
  source 1..80: mol_type = other DNA
tttagcactctccatagtgagtcctactaatttctccctttctgcttgtctcccttgtctctccttagtaagcgatacga

SEQ ID NO: 57671 - DNA, 80 bp, synthetic construct
  source 1..80: mol_type = other DNA
agctctaggatctatactgtagctaataaaatgtaaaaacacctggctctgtttcctgaccaggcacttctgtcatatcc

SEQ ID NO: 57672 - DNA, 80 bp, synthetic construct
  source 1..80: mol_type = other DNA
cctcatcttggttggcatgattcttttggaagggcatttgcaacataccatattgctaggaatgtcggtttaattgaaaa

SEQ ID NO: 57673 - DNA, 80 bp, synthetic construct; identical to SEQ ID NO: 15079
  source 1..80: mol_type = other DNA

SEQ ID NO: 57674 - DNA, 80 bp, synthetic construct
  source 1..80: mol_type = other DNA
ccccactcatagcagccagttcatatgtactgcaaggacaggggagtagaattcaggtagtgttttggtttattatctta

SEQ ID NO: 57675 - DNA, 80 bp, synthetic construct
  source 1..80: mol_type = other DNA
tgttaggatatggccaagaatcagaaactgatgcgtttttccagcactacctgtgtgctgcactcatggaaggtgggaag

SEQ ID NO: 57676 - DNA, 80 bp, synthetic construct
  source 1..80: mol_type = other DNA
tctgtctcaatgtgatataattgccaccattcaggatggctacccacatctggtatgaacaccatgacttctgtaagcca

SEQ ID NO: 57677 - DNA, 80 bp, synthetic construct; identical to SEQ ID NO: 15080
  source 1..80: mol_type = other DNA

SEQ ID NO: 57678 - DNA, 80 bp, synthetic construct
  source 1..80: mol_type = other DNA
attgtttttcttaaggacacgactgatgacacttggagccttgtcctggcttgtcacctggcagaacaggagaccaaaag

SEQ ID NO: 57679 - DNA, 80 bp, synthetic construct
  source 1..80: mol_type = other DNA
gctgcttccctgtggggaaactgctgttgattctgaaattttaacacggcgaccaaaagtttaaggtgtagcaactaatg

SEQ ID NO: 57680 - DNA, 80 bp, synthetic construct
  source 1..80: mol_type = other DNA
aactgccaaaaccaaaggtcaaaattaaaactacattcaattccatttggctgcccaaacctcagacaacatttatagtc

SEQ ID NO: 57681 - DNA, 80 bp, synthetic construct
  source 1..80: mol_type = other DNA
ccctggcccagatccctctcccccatatccagtccccccggaggcctcttctgcacccccactcagcggggagccacagg

SEQ ID NO: 57682 - DNA, 80 bp, synthetic construct; identical to SEQ ID NO: 15081
  source 1..80: mol_type = other DNA

SEQ ID NO: 57683 - DNA, 80 bp, synthetic construct
  source 1..80: mol_type = other DNA
cagtggcaggagattgggaggatcagagaaaagtggaagtcccaagaaaccaccccccagccagtgaatctctcactctg

SEQ ID NO: 57684 - DNA, 80 bp, synthetic construct
  source 1..80: mol_type = other DNA
ggagtcccaacctcacccgccagtcacctctgagcctctgtcagtggccggagcccctgtagccacctctggatatcatg

SEQ ID NO: 57685 - DNA, 80 bp, synthetic construct
  source 1..80: mol_type = other DNA
gcatccagcccagacactccgctcaccttcctccgcttgtcaaaattgatgtatccattctgcgaggaaaatggggatgg

SEQ ID NO: 57686 - DNA, 80 bp, synthetic construct; identical to SEQ ID NO: 15082
  source 1..80: mol_type = other DNA

SEQ ID NO: 57687 - DNA, 80 bp, synthetic construct
  source 1..80: mol_type = other DNA
caggagcccatcacaaaacctagatgtgcttacgtttcaggcacgttctaagcacttgacaaatacaaattcatttaacc

SEQ ID NO: 57688 - DNA, 80 bp, synthetic construct
  source 1..80: mol_type = other DNA
ttgttacatcattgcaatgacacacacacacaccactgacctccaactcatccttggaggctgcatccagcatcacaagg

SEQ ID NO: 57689 - DNA, 80 bp, synthetic construct
  source 1..80: mol_type = other DNA
tacccatccttcaggctgctcccccaaaacatactcctcaccccttcataatcaccacccccacgcccaccaccccgcta

SEQ ID NO: 57690 - DNA, 80 bp, synthetic construct; identical to SEQ ID NO: 15083
  source 1..80: mol_type = other DNA

SEQ ID NO: 57691 - DNA, 80 bp, synthetic construct
  source 1..80: mol_type = other DNA
gcagggctgacaccacggcataaactgaagagaagtttcggagcagccggcactcctgtgggggtcaaagaagagagcta

SEQ ID NO: 57692 - DNA, 80 bp, synthetic construct
  source 1..80: mol_type = other DNA
cccaggacagaactaaccactgcccctgccaccttgttaaactgtgtgacagtagctcggacagatgggcagaggtgaga

SEQ ID NO: 57693 - DNA, 80 bp, synthetic construct
  source 1..80: mol_type = other DNA
gaaccagaggggcacagggtttgaagggtaacgaccaaagggaaaaggggagaatcaaaatggtaggtggaggaggctag

SEQ ID NO: 57694 - DNA, 80 bp, synthetic construct; identical to SEQ ID NO: 15084
  source 1..80: mol_type = other DNA

SEQ ID NO: 57695 - DNA, 80 bp, synthetic construct
  source 1..80: mol_type = other DNA
gggagaagggaatcagccaagggtgagaggtaaagctgcagcctgggcagaggggactgtgagattaagaaccaggggtc

SEQ ID NO: 57696 - DNA, 80 bp, synthetic construct
  source 1..80: mol_type = other DNA
ccactaccctgcgtcccttatgactctgacctgtcagccataagccctagcaaggcaggcgtggaggtgaaggcccggtg

SEQ ID NO: 57697 - DNA, 80 bp, synthetic construct
  source 1..80: mol_type = other DNA
tttctcccactctgcacctagatttctgaggacaatcccagacccaggagatgttccagactcatttttctgatattcag

SEQ ID NO: 57698 - DNA, 80 bp, synthetic construct; identical to SEQ ID NO: 15085
  source 1..80: mol_type = other DNA

SEQ ID NO: 57699 - DNA, 80 bp, synthetic construct
  source 1..80: mol_type = other DNA
tggggcccagacagccccaccccagccgcctcagggccccggtggagtcgaaggggctgcagtggaggcgtggatggagt

SEQ ID NO: 57700 - DNA, 80 bp, synthetic construct
  source 1..80: mol_type = other DNA
gcatgccccgcccctcccggccaaggactataccagcccagagaattagtctttttcaggacccctttcaccctggtccc

SEQ ID NO: 57701 - DNA, 80 bp, synthetic construct
  source 1..80: mol_type = other DNA
aaccagccctgccagtcaacctgccctcacctaggatctggacctaggagtttagggcctcggggccccaaatccaaatt

SEQ ID NO: 57702 - DNA, 80 bp, synthetic construct; identical to SEQ ID NO: 15086
  source 1..80: mol_type = other DNA

SEQ ID NO: 57703 - DNA, 80 bp, synthetic construct
  source 1..80: mol_type = other DNA
gcaggttcctgcgggcaggtcctgagtcacactgacagagaaccacggagacgccaggactccccgcagcagagaaacgg

SEQ ID NO: 57704 - DNA, 80 bp, synthetic construct
  source 1..80: mol_type = other DNA
cccgcccacgaccaggccacctgggcccccaccctcttcggggtcccggcttcggaagctgctcagtacgactcccccgg

SEQ ID NO: 57705 - DNA, 80 bp, synthetic construct
  source 1..80: mol_type = other DNA
gggtgtcaagaagaccggaagggagttctgcaggaaggttgggggagggggcaacagaagggtggaataggggggccctt

SEQ ID NO: 57706 - DNA, 80 bp, synthetic construct; identical to SEQ ID NO: 15087
  source 1..80: mol_type = other DNA

SEQ ID NO: 57707 - DNA, 80 bp, synthetic construct
  source 1..80: mol_type = other DNA
aaagattccagtctccagcccctgggggaaggcaggagcagaatttgacattcccttccccaacaataacacggctaaaa

SEQ ID NO: 57708 - DNA, 80 bp, synthetic construct
  source 1..80: mol_type = other DNA
gcagccacatccggttccagattcggctctcagaggcttccggcgccgagaccgagatccccgtcggctcggtgtatcct

SEQ ID NO: 57709 - DNA, 80 bp, synthetic construct
  source 1..80: mol_type = other DNA
ttggaatattcattgagcttggaaaggggttggaatgagagaaccgtttggaagcactggaatacagctttattcctaca

SEQ ID NO: 57710 - DNA, 80 bp, synthetic construct; identical to SEQ ID NO: 15088
  source 1..80: mol_type = other DNA

SEQ ID NO: 57711 - DNA, 80 bp, synthetic construct
  source 1..80: mol_type = other DNA
gacctggaggtgggcgggaggcgtttggttcattggaggaaaggaatagccctgtgtgtgatgagcattgagaggaggtc

SEQ ID NO: 57712 - DNA, 80 bp, synthetic construct
  source 1..80: mol_type = other DNA
taacctcggccctacagatctctgagactatgtcagggggtttgtgagattttataacaaaattaagatgttagtacaat

SEQ ID NO: 57713 - DNA, 80 bp, synthetic construct
  source 1..80: mol_type = other DNA
gcgggcccctgtagtcccagctactcgggaagctgaggcaggagaatggcgtgaacccgggaggcggagcgtgccgtgag

SEQ ID NO: 57714 - DNA, 80 bp, synthetic construct
  source 1..80: mol_type = other DNA
atcctggctaacacggtgaaaccccgtctctactaaaaaatacaaaatattagccaggcatggtggaggacgcctgtagt

SEQ ID NO: 57715 - DNA, 80 bp, synthetic construct; identical to SEQ ID NO: 15089
  source 1..80: mol_type = other DNA

SEQ ID NO: 57716 - DNA, 80 bp, synthetic construct
  source 1..80: mol_type = other DNA
gctttttggggtccttgatgatttttaagaggtcctgagagaaaaaaattttgagaaccactgtcctagagctccaagaa

SEQ ID NO: 57717 - DNA, 80 bp, synthetic construct
  source 1..80: mol_type = other DNA
attcaagaccagcctggccaacatggtgaaaccccgtctctactaaaaatacaaaaattcactgggtgtggtggcatgtg

SEQ ID NO: 57718 - DNA, 80 bp, synthetic construct
  source 1..80: mol_type = other DNA
taagtgaaagaaaaaaaaaaaagcattccagccactcagtggagagagattggagggattaggagcagatgatagggtat

SEQ ID NO: 57719 - DNA, 80 bp, synthetic construct
  source 1..80: mol_type = other DNA
taaaaggcagttgaggtgtacatggtcagtttagagacatataaactatcatgggcacagatgatgggagaaggatgagg

SEQ ID NO: 57720 - DNA, 80 bp, synthetic construct; identical to SEQ ID NO: 15090
  source 1..80: mol_type = other DNA

SEQ ID NO: 57721 - DNA, 80 bp, synthetic construct
  source 1..80: mol_type = other DNA
gctgtgtgccaccatgcccagctaatttgttttgttttgttttgttttgttttttgagacagagcctcactctgttgccc

SEQ ID NO: 57722 - DNA, 80 bp, synthetic construct
  source 1..80: mol_type = other DNA
ctaatttttctgtatttttagtagagacggggtttcaccatgttggccaggctggtcttgaactcctgacctcaggtgat

SEQ ID NO: 57723 - DNA, 80 bp, synthetic construct
  source 1..80: mol_type = other DNA
caggctggagtgcaatggtgtgatctcagctcactgcaacctctgcctcccaggttcaagcgattctcctgccccagtct

SEQ ID NO: 57724 - DNA, 80 bp, synthetic construct; identical to SEQ ID NO: 15091
  source 1..80: mol_type = other DNA

SEQ ID NO: 57725 - DNA, 80 bp, synthetic construct
  source 1..80: mol_type = other DNA
cgctttgggaggccaaggcagcgggcggatcacctgaggtcgggagttcgagaccagcctgaccaacatggtgaaacccc

SEQ ID NO: 57726 - DNA, 80 bp, synthetic construct
  source 1..80: mol_type = other DNA
ctgtctcaaaaaaaaagagaaggaaaaaaatcttcaggccatgtgtataaggtgtataggaaacataaatgatttctgtg

SEQ ID NO: 57727 - DNA, 80 bp, synthetic construct
  source 1..80: mol_type = other DNA
tctgcttatttttttaatgtgagtactagagtatttaaatttacatatgtggcttgcattatctttctattggacagcac

SEQ ID NO: 57728 - DNA, 80 bp, synthetic construct; identical to SEQ ID NO: 15092
  source 1..80: mol_type = other DNA

SEQ ID NO: 57729 - DNA, 80 bp, synthetic construct
  source 1..80: mol_type = other DNA
cagcccagcccagtgccttgaagagcccaagcagaagaaaggcagacaggaaaaggcctacgctgtcctcaagggagggc

SEQ ID NO: 57730 - DNA, 80 bp, synthetic construct
  source 1..80: mol_type = other DNA
tagcgtgccccatgctgctcagtggtgactgggggcggctgcaagtgcccagagaggctgacagagccatcggaatggtg

SEQ ID NO: 57731 - DNA, 80 bp, synthetic construct
  source 1..80: mol_type = other DNA
gttgctggcatcagggacactttggggggttctggggaaagaggacgaaatgagcatagggaaatcagtccatactgtcc

SEQ ID NO: 57732 - DNA, 80 bp, synthetic construct; identical to SEQ ID NO: 15093
  source 1..80: mol_type = other DNA

SEQ ID NO: 57733 - DNA, 80 bp, synthetic construct
  source 1..80: mol_type = other DNA
agataggtgccctcctgaaagggttgaactgtaggcagccagaaggtcccatttccggtccatgggccccatggctcatc

SEQ ID NO: 57734 - DNA, 80 bp, synthetic construct
  source 1..80: mol_type = other DNA
tcggaggtggggggcatgtaggcaaagctcaagtccagcagagcatcttgtcccagtctcactcgaggggcaggggtgtg

SEQ ID NO: 57735 - DNA, 80 bp, synthetic construct
  source 1..80: mol_type = other DNA
catttcctagccctccctgcaaactccttttgctctgcgactgggtggcacctagtgtggctgagggtgagcagagaggt

SEQ ID NO: 57736 - DNA, 80 bp, synthetic construct; identical to SEQ ID NO: 15094
  source 1..80: mol_type = other DNA

SEQ ID NO: 57737 - DNA, 80 bp, synthetic construct
  source 1..80: mol_type = other DNA
atatggccttgggccacttcctttttccatggctcagcttcctaatctctaaaattaaaagttgatgataataatagtac

SEQ ID NO: 57738 - DNA, 80 bp, synthetic construct
  source 1..80: mol_type = other DNA
tggaacacagtaagtctacacgtgtttgctatagttacacctaacttagcataccccaagtcaacagcatctctgcaaca

SEQ ID NO: 57739 - DNA, 80 bp, synthetic construct
  source 1..80: mol_type = other DNA
atggtgaacaagacaagcagtccctgctctcaaattgcctatagtccaatgacagacaagcaaattgtcaaaaataatgt

SEQ ID NO: 57740 - DNA, 80 bp, synthetic construct; identical to SEQ ID NO: 15095
  source 1..80: mol_type = other DNA

SEQ ID NO: 57741 - DNA, 80 bp, synthetic construct
  source 1..80: mol_type = other DNA
catgcctgtaatcccagctactcgggagaccgaggcagtagaattgcttgaacccgggaagcagaggttgcggtgagccg

SEQ ID NO: 57742 - DNA, 80 bp, synthetic construct
  source 1..80: mol_type = other DNA
gaccagcctggccaacatggcaaaaccctgtctctactaaaaatacaaaaattagccaggtgtgggggcaggcacctgta

SEQ ID NO: 57743 - DNA, 80 bp, synthetic construct
  source 1..80: mol_type = other DNA
aggaagtcagctgataaaggcataggctgaagctatatggcctgggttcaatttctagccctgcttcttttttttttttt

SEQ ID NO: 57744 - DNA, 80 bp, synthetic construct
  source 1..80: mol_type = other DNA
agtagctgggattacaggcgtccacaaccgtgcccagctaatttttgtatttttggtagagatggggtttcaccatgttg

SEQ ID NO: 57745 - DNA, 80 bp, synthetic construct; identical to SEQ ID NO: 15096
  source 1..80: mol_type = other DNA

SEQ ID NO: 57746 - DNA, 80 bp, synthetic construct
  source 1..80: mol_type = other DNA
tcatggacttgctggttaacttggaaaaatcatttaacctgtattttcctcactagtccaaagatctgacctttgcctat

SEQ ID NO: 57747 - DNA, 80 bp, synthetic construct
  source 1..80: mol_type = other DNA
gcctggccaacatggtgaaaccccatctctactaaaaatacaaaaaaaaaaaaaaaaaaaattagcggggcgtggttgtg

SEQ ID NO: 57748 - DNA, 80 bp, synthetic construct
  source 1..80: mol_type = other DNA
ggctttttagaataacacgccctccaaaagaacttctgatggttcgctctcacctacagaacaaagcccagctttcaagg

SEQ ID NO: 57749 - DNA, 80 bp, synthetic construct; identical to SEQ ID NO: 15097
  source 1..80: mol_type = other DNA

SEQ ID NO: 57750 - DNA, 80 bp, synthetic construct
  source 1..80: mol_type = other DNA
atctaaatactccatgtacatgaaggtcactttcactgctgtttcttcccagaaatgtctaggtccttcaggtagaagta

SEQ ID NO: 57751 - DNA, 80 bp, synthetic construct
  source 1..80: mol_type = other DNA
tcatggaattgttcagtagagtaaaaacagtatgcaatttcacttagtttgtcaaaatccagaaacatacttttgaattg

SEQ ID NO: 57752 - DNA, 80 bp, synthetic construct
  source 1..80: mol_type = other DNA
ggtggcacacgcctgtaatcacagctgcttgggaagctgaggcaggagaatcacttgaacctgggaggcggaggttgtgg

SEQ ID NO: 57753 - DNA, 80 bp, synthetic construct; identical to SEQ ID NO: 15098
  source 1..80: mol_type = other DNA

SEQ ID NO: 57754 - DNA, 80 bp, synthetic construct
  source 1..80: mol_type = other DNA
ttttttttttttttttgagacagtttcacgcttgttgcccaggctggagtgcagtggcatgatcttggctcactgcaacc

SEQ ID NO: 57755 - DNA, 80 bp, synthetic construct
  source 1..80: mol_type = other DNA
cccacctcggcctcccaaagtgctgggattacaggcatgagccactgcgcccagcatttttttaatttttagtagagaca

SEQ ID NO: 57756 - DNA, 80 bp, synthetic construct
  source 1..80: mol_type = other DNA
atattaagaaagtataggcctggcgtggtggctcacgcctgtaatcccagcaatttgggaggctgaggtgggtggatcac

SEQ ID NO: 57757 - DNA, 80 bp, synthetic construct
  source 1..80: mol_type = other DNA
atgagcagagatcacaccattgcactccagcctgggcaacagggtgagactctgtctcaaaaaaaaaaaaaaaaaaaaaa

SEQ ID NO: 57758 - DNA, 80 bp, synthetic construct; identical to SEQ ID NO: 15099
  source 1..80: mol_type = other DNA

SEQ ID NO: 57759 - DNA, 80 bp, synthetic construct
  source 1..80: mol_type = other DNA
tcttggaccctggagagatttcatttctaattttacatcagtacaacagctttcattttcttaaatccctgatcaagcag

SEQ ID NO: 57760 - DNA, 80 bp, synthetic construct
  source 1..80: mol_type = other DNA
taggtgggcgtggtggcacaagcctgtaatcccagctactggggaggctaaggcacaagaattgcttgaacatgggagac

SEQ ID NO: 57761 - DNA, 80 bp, synthetic construct
  source 1..80: mol_type = other DNA
cacctgaagttgggagttcgagaccagccttaccaacatggagaaacctcatctctactaaaaatacaaaattagctggg

SEQ ID NO: 57762 - DNA, 80 bp, synthetic construct; identical to SEQ ID NO: 15100
  source 1..80: mol_type = other DNA

SEQ ID NO: 57763 - DNA, 80 bp, synthetic construct
  source 1..80: mol_type = other DNA
tcggccaagctaagcatgggattgaatcaggtttcagtatattttagaaacctccaacagtgtggactgagaactgctga

SEQ ID NO: 57764 - DNA, 80 bp, synthetic construct
  source 1..80: mol_type = other DNA
gttggaaaaacaaactcagaaagcaaagaccattctcatcatcacctcggtggagccagtagccctaggaaatattccac

SEQ ID NO: 57765 - DNA, 80 bp, synthetic construct
  source 1..80: mol_type = other DNA
agggaagggagggtgcagggattggttggggttgccctgtccatcgggctgtgtcgctgacataaaatccagatagaaaa

SEQ ID NO: 57766 - DNA, 80 bp, synthetic construct; identical to SEQ ID NO: 15101
  source 1..80: mol_type = other DNA

SEQ ID NO: 57767 - DNA, 80 bp, synthetic construct
  source 1..80: mol_type = other DNA
tgcagagcaagacacagatctgggaagagcagagaaaaaacgctcctgcttctgaacccctcccacctcgcatcacctga

SEQ ID NO: 57768 - DNA, 80 bp, synthetic construct
  source 1..80: mol_type = other DNA
aaggagcggtagagattgattcattctagccaaaccacctctcttaacaaaaaaaggaaactgaaccccgattggcgaaa

SEQ ID NO: 57769 - DNA, 80 bp, synthetic construct
  source 1..80: mol_type = other DNA
aggactgggctggatatgctgaccatcagccaagccccatccagggcccgcgggcagttctgcgcgggggtcaggccgct

SEQ ID NO: 57770 - DNA, 80 bp, synthetic construct; identical to SEQ ID NO: 15102
  source 1..80: mol_type = other DNA

SEQ ID NO: 57771 - DNA, 80 bp, synthetic construct
  source 1..80: mol_type = other DNA
agtgcaccgggtctcttggccaggccctttccgctcgcatcctccacgaaccaacactcgatcaccgcgggtcctgctga

SEQ ID NO: 57772 - DNA, 80 bp, synthetic construct
  source 1..80: mol_type = other DNA
aagccacagcgaggagcagagacagggacttcatggcgctgcgacctcctcagccatgaagcctcctcttcctcctttca

SEQ ID NO: 57773 - DNA, 80 bp, synthetic construct
  source 1..80: mol_type = other DNA
tccagttctcaccaggacaccccagccttaccgcgccctcctggactacccagcagccccgagttcgagccctccccaac

SEQ ID NO: 57774 - DNA, 80 bp, synthetic construct; identical to SEQ ID NO: 15103
  source 1..80: mol_type = other DNA

SEQ ID NO: 57775 - DNA, 80 bp, synthetic construct
  source 1..80: mol_type = other DNA
acaaacacagacttcaggcacagactacaaccacctgacccctgaccctgtgactgcaggatgttcaacacgccccctct

SEQ ID NO: 57776 - DNA, 80 bp, synthetic construct
  source 1..80: mol_type = other DNA
gggcgatggtgaaactgtggttccccttccagaatatatacaagtccacagagataaaggaagacagtaagtgtggtggg

SEQ ID NO: 57777 - DNA, 80 bp, synthetic construct
  source 1..80: mol_type = other DNA
caccttgtggactctgggtggggaccagacacgtctgctggacgggggcgtggccgcactcgcttcgtcgccgctgcccc

SEQ ID NO: 57778 - DNA, 80 bp, synthetic construct
  source 1..80: mol_type = other DNA
gcactcgtagggcttgagacctgtgtgcgtcttcatgtgctcagtcagatggtgcttcatcttgaactttttgttgcaca

SEQ ID NO: 57779 - DNA, 80 bp, synthetic construct; identical to SEQ ID NO: 15104
  source 1..80: mol_type = other DNA

SEQ ID NO: 57780 - DNA, 80 bp, synthetic construct
  source 1..80: mol_type = other DNA
gtcattggaggactcacagaagttgacctgctcctcccccttgtctgggggctcactcagggtacggacatcacttatgc

SEQ ID NO: 57781 - DNA, 80 bp, synthetic construct
  source 1..80: mol_type = other DNA
acctcgcttcacgtatacccagtgtttctgtggcatgatgctagggggtgtgtaggtgggtctccggagcccagccccag

SEQ ID NO: 57782 - DNA, 80 bp, synthetic construct
  source 1..80: mol_type = other DNA
ctcttgggaggaagatgagaaatcagtggactccctggggctgaagtagttgctgctgctgggagattgattctcactgg

SEQ ID NO: 57783 - DNA, 80 bp, synthetic construct; identical to SEQ ID NO: 15105
  source 1..80: mol_type = other DNA

SEQ ID NO: 57784 - DNA, 80 bp, synthetic construct
  source 1..80: mol_type = other DNA
cactctgatagatacatcgcagagctggccctgcagacgctgctgattgagggactccaagagggcactggtcacctcag

SEQ ID NO: 57785 - DNA, 80 bp, synthetic construct
  source 1..80: mol_type = other DNA
gggcggccgggggggtctctgggaagaaaaagagaaaagaataatgataacatctcataacgacacagcccgttacaact

SEQ ID NO: 57786 - DNA, 80 bp, synthetic construct
  source 1..80: mol_type = other DNA
tgacaaatcttgtgccctttccttggaggttagagaaataaggtgctcttaggggctggagtggcttccttcggaattat

SEQ ID NO: 57787 - DNA, 80 bp, synthetic construct; identical to SEQ ID NO: 15106
  source 1..80: mol_type = other DNA

SEQ ID NO: 57788 - DNA, 80 bp, synthetic construct
  source 1..80: mol_type = other DNA
ctcggcggccagagcagcaacctgggcccctcccgccgccatcttgcgccgactccctccgccctccgcctccgctccgc

SEQ ID NO: 57789 - DNA, 80 bp, synthetic construct
  source 1..80: mol_type = other DNA
ccgaagcatttattcccctttaaagctataagcctgccttttcccattggcgatgggtccaggtatcgttccccaggctc

SEQ ID NO: 57790 - DNA, 80 bp, synthetic construct
  source 1..80: mol_type = other DNA
gtgaaaaagtaaagtgcgttaaggcggctgaagcacttaaaaaaaaaaaaaagtactgcctgaacaacgtggcgaaaccc

SEQ ID NO: 57791 - DNA, 80 bp, synthetic construct; identical to SEQ ID NO: 15107
  source 1..80: mol_type = other DNA

SEQ ID NO: 57792 - DNA, 80 bp, synthetic construct
  source 1..80: mol_type = other DNA
aagcttttttttttttttaaagaaacaccaccaaaaggggattagcttagtccatcccttcctcagtcatctgcttccca

SEQ ID NO: 57793 - DNA, 80 bp, synthetic construct
  source 1..80: mol_type = other DNA
ggagaaaagaaacaggaggatttagaggataaaatgggtgggaaaaaggaagagacaggatgtggcacgtggaatattca

SEQ ID NO: 57794 - DNA, 80 bp, synthetic construct
  source 1..80: mol_type = other DNA
tggctgggagagtccaccctcgtggaggaatcagcaactggggccaaggaagccaagggggaaggtgggctgggcagggt

SEQ ID NO: 57795 - DNA, 80 bp, synthetic construct; identical to SEQ ID NO: 15108
  source 1..80: mol_type = other DNA

SEQ ID NO: 57796 - DNA, 80 bp, synthetic construct
  source 1..80: mol_type = other DNA
cgtctccacagaggaaggggtatccaggggcaaagcttcaatctctagctcaaagagctgagacacagggctttcttcct

SEQ ID NO: 57797 - DNA, 80 bp, synthetic construct
  source 1..80: mol_type = other DNA
aagatctgctgatctgtttgccaggttccaggttcttttcattggagatctgtagtgaggacatggggctcttgtctcca

SEQ ID NO: 57798 - DNA, 80 bp, synthetic construct
  source 1..80: mol_type = other DNA
caaaacagaaatgacaggtgaggagaatgttcccttgacatacctgctgctgcttcttcctcttcgtcctcctcttcatc

SEQ ID NO: 57799 - DNA, 80 bp, synthetic construct; identical to SEQ ID NO: 15109
  source 1..80: mol_type = other DNA

SEQ ID NO: 57800 - DNA, 80 bp, synthetic construct
  source 1..80: mol_type = other DNA
ttctcttttttctctcgccctcctcacttttgtcttgcaacattgcatatttggagatgacctcatccagccgactcatg

SEQ ID NO: 57801 - DNA, 80 bp, synthetic construct
  source 1..80: mol_type = other DNA
aaaaccctagaaaggactagagagatgccccatccgcctcatacctgacatataagggtcactgagaggcatcccaccaa

SEQ ID NO: 57802 - DNA, 80 bp, synthetic construct
  source 1..80: mol_type = other DNA
gccttctctacagcccgaagcacatccccatagtcagggaaggtatcaggccctggcttgttgatgagccgctcaatgcg

SEQ ID NO: 57803 - DNA, 80 bp, synthetic construct; identical to SEQ ID NO: 15110
  source 1..80: mol_type = other DNA

SEQ ID NO: 57804 - DNA, 80 bp, synthetic construct
  source 1..80: mol_type = other DNA
ggcggcaggggccaagttcagcttctttttggctgagtgggccttgagaacagtgcagagctcattgatgtagacataga

SEQ ID NO: 57805 - DNA, 80 bp, synthetic construct
  source 1..80: mol_type = other DNA
ctagaaggttcaggggaagaaggaaggggaagagagacaagggagggggttgagagaaaggggaggtggggttagtggga

SEQ ID NO: 57806 - DNA, 80 bp, synthetic construct
  source 1..80: mol_type = other DNA
taggggcttctgccccaggtgaggccgcattggggagtgggtgggagggccctggctgagcagctgcttcatcttcgtca

SEQ ID NO: 57807 - DNA, 80 bp, synthetic construct; identical to SEQ ID NO: 15111
  source 1..80: mol_type = other DNA

SEQ ID NO: 57808 - DNA, 80 bp, synthetic construct
  source 1..80: mol_type = other DNA
atttcttagagttggcaagttgattcttcctcccacactgcaccccaaatcgtcctgacacccccttgcacagacaacac

SEQ ID NO: 57809 - DNA, 80 bp, synthetic construct
  source 1..80: mol_type = other DNA
tccatatttcaccctccgatgagtctcctcaaactggggctttaggttgaagatattttacccaagtcccctccctttca

SEQ ID NO: 57810 - DNA, 80 bp, synthetic construct
  source 1..80: mol_type = other DNA
cggccgctccactccctttcagggacaggaaggtaccacagctttcccctcagactcagcgcccagctctccccaatacc

SEQ ID NO: 57811 - DNA, 80 bp, synthetic construct; identical to SEQ ID NO: 15112
  source 1..80: mol_type = other DNA

SEQ ID NO: 57812 - DNA, 80 bp, synthetic construct
  source 1..80: mol_type = other DNA
gtggagctcttttcacccggtgcttctacgactccgccaatcagaaacttcctgcctggggcccaaccgccggagagtag

SEQ ID NO: 57813 - DNA, 80 bp, synthetic construct
  source 1..80: mol_type = other DNA
gggaagtaaaaccttttctttcagttgggctattggcaagctatctggccctgctttcctgtcccccaggttcccatttc

SEQ ID NO: 57814 - DNA, 80 bp, synthetic construct
  source 1..80: mol_type = other DNA
ctattgttgctgatttgcttttcaagcttcaccacagaactaatgaccagccagaccgttgggacctgaatggttcttct

SEQ ID NO: 57815 - DNA, 80 bp, synthetic construct; identical to SEQ ID NO: 15113
  source 1..80: mol_type = other DNA

SEQ ID NO: 57816 - DNA, 80 bp, synthetic construct
  source 1..80: mol_type = other DNA
caagtggtgggcatcttgccacttaactagggtcacagagcttattagatccctaacgctgagtcctagaatcgcaaaca

SEQ ID NO: 57817 - DNA, 80 bp, synthetic construct
  source 1..80: mol_type = other DNA
ttcaagaacctcaactttcccaaaattggtcttcctaaggaaacacctgcagtacaggttctcattcttcacttctcctt

SEQ ID NO: 57818 - DNA, 80 bp, synthetic construct
  source 1..80: mol_type = other DNA
catgaataccaccttttcttttttttttttttttttttcctttcttttgtcttttttttttttaaatgcagggtcggccg

SEQ ID NO: 57819 - DNA, 80 bp, synthetic construct
  source 1..80: mol_type = other DNA
ccagctactcaggaggctgaggcaggagaaccgctcgaatccgggaggcggaggttgcagtaagccgagatcgcgtcatt

SEQ ID NO: 57820 - DNA, 80 bp, synthetic construct; identical to SEQ ID NO: 15114
  source 1..80: mol_type = other DNA

SEQ ID NO: 57821 - DNA, 80 bp, synthetic construct
  source 1..80: mol_type = other DNA
tcccagctactcgggaggctgaggcaggagaatcgcttgaacccgggaggcggaggtcgcagtgagctgagatcagccac

SEQ ID NO: 57822 - DNA, 80 bp, synthetic construct
  source 1..80: mol_type = other DNA
cgtgaaccgccactcccagactactatcttattaaatatttctttttaacagttataaaaatgtttacgatcggccaggc

SEQ ID NO: 57823 - DNA, 80 bp, synthetic construct
  source 1..80: mol_type = other DNA
gcgccttgtagacccagctactccggaggctgaggcaggagaatggcgtgaacccgggaggcggagcttgcagtgagccg

SEQ ID NO: 57824 - DNA, 80 bp, synthetic construct; identical to SEQ ID NO: 15115
  source 1..80: mol_type = other DNA

SEQ ID NO: 57825 - DNA, 80 bp, synthetic construct
  source 1..80: mol_type = other DNA
tggagttcaatggcacaatctctgcttactgcaacctcccactcccgggtttaagcgattctcctgcctcaacctcctga

SEQ ID NO: 57826 - DNA, 80 bp, synthetic construct
  source 1..80: mol_type = other DNA
ttacaggcgtgaagcaccgtgcccggccatcactatgatatttcaattccactggacaataaatggtgatctaattgttt

SEQ ID NO: 57827 - DNA, 80 bp, synthetic construct; identical to SEQ ID NO: 15116
  source 1..80: mol_type = other DNA

SEQ ID NO: 57828 - DNA, 80 bp, synthetic construct
  source 1..80: mol_type = other DNA
cctgcccaacatgatgaaaccccgtctctactaaaattacaaaaaaattagctgggtgtagtggcgggcgcctgtagtcc

SEQ ID NO: 57829 - DNA, 80 bp, synthetic construct
  source 1..80: mol_type = other DNA
ttccagcactttgggaggccgaggcaggcagatcacgaagtctaggagttcgagaccagcctggccaatatggtgacacc

SEQ ID NO: 57830 - DNA, 80 bp, synthetic construct
  source 1..80: mol_type = other DNA
caagactctgtctcaaaaaataaataaataaaataaaatgtggccagctgtggctcaccgcctataatcctagcactttg

SEQ ID NO: 57831 - DNA, 80 bp, synthetic construct
  source 1..80: mol_type = other DNA
tcaggagttccagaccagccttgccaacatgatgaaaccttgtctctactaaaaatacaaaaattagctgggcacggtgg

SEQ ID NO: 57832 - DNA, 80 bp, synthetic construct; identical to SEQ ID NO: 15117
  source 1..80: mol_type = other DNA

SEQ ID NO: 57833 - DNA, 80 bp, synthetic construct
  source 1..80: mol_type = other DNA
tgcactgcagcctgggcgacagagcaagactccatctcaaaaaaaaaataaaaattaaaaaataaataaaatgtgaatat

SEQ ID NO: 57834 - DNA, 80 bp, synthetic construct
  source 1..80: mol_type = other DNA
caattctcctgcctcagcctctgagtagctgaggcagagaatcaggtgcccaccaactttcccggctaatttttgtattt

SEQ ID NO: 57835 - DNA, 80 bp, synthetic construct
  source 1..80: mol_type = other DNA
ttaaagatatatgaaggagtatatacttcttcaaaattatttccctgagtataggtgcagaatttaagactgctgccctg

SEQ ID NO: 57836 - DNA, 80 bp, synthetic construct
  source 1..80: mol_type = other DNA
cccagctactcaggaggctgaggcaggagaatcccttgaaccctggaggcagaggttgcagtgagccaagattgtgccat

SEQ ID NO: 57837 - DNA, 80 bp, synthetic construct; identical to SEQ ID NO: 15118
  source 1..80: mol_type = other DNA

SEQ ID NO: 57838 - DNA, 80 bp, synthetic construct
  source 1..80: mol_type = other DNA
atcaccttcctctgccatcctgactcacagtcagacagctggctggatcagggggctgggatgcaaggccttgctcagca

SEQ ID NO: 57839 - DNA, 80 bp, synthetic construct
  source 1..80: mol_type = other DNA
actctattcagctttttcatagtataattctgtgatttggaaactgaaggcccaacatgaaggcataagctagaactgcc

SEQ ID NO: 57840 - DNA, 80 bp, synthetic construct
  source 1..80: mol_type = other DNA
ctaaccaaggcgggtaggaacaagcagaggggacttgagttctcacaggagtagttctccccactgggtctgcaggcagc

SEQ ID NO: 57841 - DNA, 80 bp, synthetic construct; identical to SEQ ID NO: 15119
  source 1..80: mol_type = other DNA

SEQ ID NO: 57842 - DNA, 80 bp, synthetic construct
  source 1..80: mol_type = other DNA
tgtatttttagtagagacggggtttcaccatgttggtcaagctggtctggaactcctgacctcaaatgatccacccacct

SEQ ID NO: 57843 - DNA, 80 bp, synthetic construct
  source 1..80: mol_type = other DNA
cttttctttcttttttttttttttttttgactgattgaagaccttttcttaggccaggcgtggtggctcacgcctgtaat

SEQ ID NO: 57844 - DNA, 80 bp, synthetic construct
  source 1..80: mol_type = other DNA
ggagaatctcttgaaactgggaggcggaggttgccatgagctaagatcatgccactgcaactgcactccaacctgggtga

SEQ ID NO: 57845 - DNA, 80 bp, synthetic construct; identical to SEQ ID NO: 15120
  source 1..80: mol_type = other DNA

SEQ ID NO: 57846 - DNA, 80 bp, synthetic construct
  source 1..80: mol_type = other DNA
ctcagcctcccaagtcgctggaattacaggtacgtgccaccacgcctggctaattttttgtacctttagtagagacgggg

SEQ ID NO: 57847 - DNA, 80 bp, synthetic construct
  source 1..80: mol_type = other DNA
ctgcagccttgatctccccagctcaagcaatcctcccatcttagcctcctgagtagttgggaccacaggtgtgtgtcacc

SEQ ID NO: 57848 - DNA, 80 bp, synthetic construct
  source 1..80: mol_type = other DNA
acaagcataagccaccatgcctaagaataccttctttacttgggaagtcaggtcaccccccaaaagagcagaaatgatgt

SEQ ID NO: 57849 - DNA, 80 bp, synthetic construct
  source 1..80: mol_type = other DNA
gcggtggctcacgcctgtaatcccagcactttgggaggccgaggcggacagatcacgaggtcaggagatcgagaccatcc

SEQ ID NO: 57850 - DNA, 80 bp, synthetic construct; identical to SEQ ID NO: 15121
  source 1..80: mol_type = other DNA

SEQ ID NO: 57851 - DNA, 80 bp, synthetic construct
  source 1..80: mol_type = other DNA
tgtcttttgctgcagctgcaaaggagtctcgaaaaagtgaaaaaaccctggactagaatttaaactgatcacttagttgt

SEQ ID NO: 57852 - DNA, 80 bp, synthetic construct
  source 1..80: mol_type = other DNA
aacatattaatctgataccctcacttacatcccaggcaagtgtgcaataaggccacacaaacacctttattgtctcttta

SEQ ID NO: 57853 - DNA, 80 bp, synthetic construct; identical to SEQ ID NO: 15122
  source 1..80: mol_type = other DNA

SEQ ID NO: 57854 - DNA, 80 bp, synthetic construct
  source 1..80: mol_type = other DNA
acaaaaaactagccgggtgtggtggtgggcgcctgtagtcctagctactcaggaggctgaggcaggggaatggcttgaac

SEQ ID NO: 57855 - DNA, 80 bp, synthetic construct
  source 1..80: mol_type = other DNA
agatcacaaggtcaggagtttgagactagcctggccaacatggcaaaaacccatatctactaaaaatacaaaaattagct

SEQ ID NO: 57856 - DNA, 80 bp, synthetic construct
  source 1..80: mol_type = other DNA
aaaaaaaaaggtgaagaattcatttgttcgcatgttctcacttacaagtgatgatgagaatacacggacacacggtggga

SEQ ID NO: 57857 - DNA, 80 bp, synthetic construct; identical to SEQ ID NO: 15123
  source 1..80: mol_type = other DNA

SEQ ID NO: 57858 - DNA, 80 bp, synthetic construct
  source 1..80: mol_type = other DNA
gatagagagaatgacatgtgaccatgaaggcagagatcaggttgatatgtcaaagattgccagcaggccaggcaccatgg

SEQ ID NO: 57859 - DNA, 80 bp, synthetic construct
  source 1..80: mol_type = other DNA
tgggaggctgaggcgggcagatcacgaggtcaggagttcaagaccagcctggtcaacatggtgaaaccctgcctctacta

SEQ ID NO: 57860 - DNA, 80 bp, synthetic construct
  source 1..80: mol_type = other DNA
aaaaaaaaaaaaaaatacaaaatgttagccgggcgtggtcgtgggtgcctgtaatcccagctactcaatcgggaggctga

SEQ ID NO: 57861 - DNA, 80 bp, synthetic construct; identical to SEQ ID NO: 15124
  source 1..80: mol_type = other DNA

SEQ ID NO: 57862 - DNA, 80 bp, synthetic construct
  source 1..80: mol_type = other DNA
atgaccgcctcttcttttttaaattatcttttttttttttttttttttggagacaggtctgtcacccaggctggagtgca

SEQ ID NO: 57863 - DNA, 80 bp, synthetic construct
  source 1..80: mol_type = other DNA
tcttgaactcctgagctcaggcaatccacccgcctaggcctcccaaagtgcaattatcttttcttttaacagctgttttt

SEQ ID NO: 57864 - DNA, 80 bp, synthetic construct
  source 1..80: mol_type = other DNA
ccatacttggcctatctgtcctttctagtccaggatcacatactgcatttgactgtcacatatctatctgtagtctcctt

SEQ ID NO: 57865 - DNA, 80 bp, synthetic construct; identical to SEQ ID NO: 15125
  source 1..80: mol_type = other DNA

SEQ ID NO: 57866 - DNA, 80 bp, synthetic construct
  source 1..80: mol_type = other DNA
ccagcgtggtgaaaccccatctctactaaaactccaaaaaattagccaggcatggtggcacatgcctgtaatcccagcta

SEQ ID NO: 57867 - DNA, 80 bp, synthetic construct
  source 1..80: mol_type = other DNA
tattgctggctttgatgatgtaagatgccatattggagaaacccacatggcaagaaactaggtgtggtctccaaacacta

SEQ ID NO: 57868 - DNA, 80 bp, synthetic construct
  source 1..80: mol_type = other DNA
acccaggctagagtgcaatgtgctatctcgcctcattgcaacctccacctcccaggttcaatcgattctcctgcctcagc

SEQ ID NO: 57869 - DNA, 80 bp, synthetic construct; identical to SEQ ID NO: 15126
  source 1..80: mol_type = other DNA

SEQ ID NO: 57870 - DNA, 80 bp, synthetic construct
  source 1..80: mol_type = other DNA
atacacccatatattccttccaaatttattcttttaacatttatgatatgtggggccttctgaaatgtggggctccaggc

SEQ ID NO: 57871 - DNA, 80 bp, synthetic construct; identical to SEQ ID NO: 15127
  source 1..80: mol_type = other DNA

SEQ ID NO: 57872 - DNA, 80 bp, synthetic construct
  source 1..80: mol_type = other DNA
ggctgaagcacaagaattgcttgaacctgggaggcggtggttgcagtgagccgatatcataccactgcattccagcctgg

SEQ ID NO: 57873 - DNA, 80 bp, synthetic construct
  source 1..80: mol_type = other DNA
tcaagggatcgagaccagcctggccaacatggtgaaaccccatctctactaaaaatacaaaaattagctgggcgtggtgg

SEQ ID NO: 57874 - DNA, 80 bp, synthetic construct
  source 1..80: mol_type = other DNA
ggctcacgcttgtaatcacagcactatgggaggccgagacaggcggatcacgaggtcaggagatcgagacaatcctgact

SEQ ID NO: 57875 - DNA, 80 bp, synthetic construct; identical to SEQ ID NO: 15128
  source 1..80: mol_type = other DNA

SEQ ID NO: 57876 - DNA, 80 bp, synthetic construct
  source 1..80: mol_type = other DNA
agctactcccgggttcaagcaattcttgtgcctcagcctcccaagtagatgggattacaggtgtgcaccaccacacacct

SEQ ID NO: 57877 - DNA, 80 bp, synthetic construct
  source 1..80: mol_type = other DNA
aaataaatatatatatgtaaaatatatatatgtaatatatgtaaaatatatatgttatatatgtaaatatatatatatat

SEQ ID NO: 57878 - DNA, 80 bp, synthetic construct
  source 1..80: mol_type = other DNA
accacgcctggataattttttatttttagtagagattgggtttctccatattggtcaggctggtctcgaactcctgacct

SEQ ID NO: 57879 - DNA, 80 bp, synthetic construct; identical to SEQ ID NO: 15129
  source 1..80: mol_type = other DNA

SEQ ID NO: 57880 - DNA, 80 bp, synthetic construct
  source 1..80: mol_type = other DNA
ttcaacatgattgatcagaacagagatggtttcatcaacaaagaagatttgcatgatatgcttgtttccctagggaagaa

SEQ ID NO: 57881 - DNA, 80 bp, synthetic construct
  source 1..80: mol_type = other DNA
aaatgcttttgcttgctttgatgaagaagcaacaggcattattcaggaagattacctgagagagctgctgataaccatgt

SEQ ID NO: 57882 - DNA, 80 bp, synthetic construct
  source 1..80: mol_type = other DNA
acgactgaaaagaactttagctaaaaccttccaactacattgtcttactctgttttatttctcagacacttcccccatcc

SEQ ID NO: 57883 - DNA, 80 bp, synthetic construct; identical to SEQ ID NO: 15130
  source 1..80: mol_type = other DNA

SEQ ID NO: 57884 - DNA, 80 bp, synthetic construct
  source 1..80: mol_type = other DNA
cccagcctgggcaacaagagcaaaattcagtcaaaaaaaaaaaaaagaaagaaagaaaagaaaagaaggccaggcacggt

SEQ ID NO: 57885 - DNA, 80 bp, synthetic construct
  source 1..80: mol_type = other DNA
tcgggaggctgaggcaggagaatggcatgaagccaggaggcagagcttgcagtgagccgagattgagccactgcactccg

SEQ ID NO: 57886 - DNA, 80 bp, synthetic construct
  source 1..80: mol_type = other DNA
taaatttccacactgatgagagaaaatgagtatcagaagaagaagaagagttgtaagatcaacaggatatgagaaatgaa

SEQ ID NO: 57887 - DNA, 80 bp, synthetic construct
  source 1..80: mol_type = other DNA
tgcctgtaatcccagctatgcaggaggctgaggcaggagaatcgcttgagcctgggaggcggtggttgcagtgagccgag

SEQ ID NO: 57888 - DNA, 80 bp, synthetic construct; identical to SEQ ID NO: 15131
  source 1..80: mol_type = other DNA

SEQ ID NO: 57889 - DNA, 80 bp, synthetic construct
  source 1..80: mol_type = other DNA
ctcgcacctgtaatcccagctacttgggaggctgagacaggggaattatttgaacccagcaggtggaagttgcagtgagc

SEQ ID NO: 57890 - DNA, 80 bp, synthetic construct
  source 1..80: mol_type = other DNA
accagcctgaccaacatgatgaaaccccgtccctactaaaaatacaaaaaaattagctgggtgtggtggtgcatgcctgt

SEQ ID NO: 57891 - DNA, 80 bp, synthetic construct
  source 1..80: mol_type = other DNA
taatcccagcactttgggaggccgagatgggtggatcacgaggtcaggagatctagaccatcccggctaacatggtgaaa

SEQ ID NO: 57892 - DNA, 80 bp, synthetic construct; identical to SEQ ID NO: 15132
  source 1..80: mol_type = other DNA

SEQ ID NO: 57893 - DNA, 80 bp, synthetic construct
  source 1..80: mol_type = other DNA
agacaggagaatcacttgacaggaggcagaggttctggtgagctgagatcacaccattgcactccaacctgggcaacaag

SEQ ID NO: 57894 - DNA, 80 bp, synthetic construct
  source 1..80: mol_type = other DNA
gcttgggcaacatagtgagactctgtcacgaagcctgcagtgcagtgacgagatcttggctcactgcaatctctgcatct

SEQ ID NO: 57895 - DNA, 80 bp, synthetic construct
  source 1..80: mol_type = other DNA
tttttttttttttgagacggagtctcgttctgttgccctggctggagtgcagtggcgtgatctcagctcactgcaacctc

SEQ ID NO: 57896 - DNA, 80 bp, synthetic construct; identical to SEQ ID NO: 15133
  source 1..80: mol_type = other DNA

SEQ ID NO: 57897 - DNA, 80 bp, synthetic construct
  source 1..80: mol_type = other DNA
cactactcttttccttgcttttcctcacttaataccttgaaatcaaacagagaggtgcttccttctttttttttttcgga

SEQ ID NO: 57898 - DNA, 80 bp, synthetic construct
  source 1..80: mol_type = other DNA
agtagagatggggtttcaccatattggccaggctggtctcgaactcctgacctcatgatccttctgacttggcctcccaa

SEQ ID NO: 57899 - DNA, 80 bp, synthetic construct
  source 1..80: mol_type = other DNA
gggattataggagtgagccaccgcacccgaccccttgtttgttatagtgctcccttgactctcaaaaatgtccagtgtag

SEQ ID NO: 57900 - DNA, 80 bp, synthetic construct; identical to SEQ ID NO: 15134
  source 1..80: mol_type = other DNA

SEQ ID NO: 57901 - DNA, 80 bp, synthetic construct
  source 1..80: mol_type = other DNA
accttccttcctgtcggcaatgtgtgacagtaccagtttcctttccccaccccatcagctgagtgtgttatcaaactttt

SEQ ID NO: 57902 - DNA, 80 bp, synthetic construct
  source 1..80: mol_type = other DNA
tctgtatttttagtagagacagggttttgccatgtttttttgtttgttttgagacaggatctttctctgttgcccaggct

SEQ ID NO: 57903 - DNA, 80 bp, synthetic construct
  source 1..80: mol_type = other DNA
acactgtaaaggcctcagataacaggaagtggtagagaactgcagccaatctaacacctagacaaattcaaggtgggacc

SEQ ID NO: 57904 - DNA, 80 bp, synthetic construct; identical to SEQ ID NO: 15135
  source 1..80: mol_type = other DNA

SEQ ID NO: 57905 - DNA, 80 bp, synthetic construct
  source 1..80: mol_type = other DNA
aaggcaagaaagaaattcttgaggaagccagccactctgccagtttcacactggcagcttcccatgtcaaaccactcagt

SEQ ID NO: 57906 - DNA, 80 bp, synthetic construct
  source 1..80: mol_type = other DNA
aagaactagccccacacaacatatttaaaggggtggggacacttgagtgtggggggtgcacagcaacatattcaagctta

SEQ ID NO: 57907 - DNA, 80 bp, synthetic construct
  source 1..80: mol_type = other DNA
tgagtgcttttacgaggccgcaggtgtctcacgacccgacctcaaaaagccatctagtggatgtttgtggtttaacaagc

SEQ ID NO: 57908 - DNA, 80 bp, synthetic construct; identical to SEQ ID NO: 15136
  source 1..80: mol_type = other DNA

SEQ ID NO: 57909 - DNA, 80 bp, synthetic construct
  source 1..80: mol_type = other DNA
tggttcaagctattctcctgcctcagcctcctgaatagctgggattacaggtgcacgtcaccccacaacaggacttaatt

SEQ ID NO: 57910 - DNA, 80 bp, synthetic construct
  source 1..80: mol_type = other DNA
catcaggatcttgcttcaagtgccagaaatctggccactgggccaagaaatgcccacagcccgggattcctcctaagccg

SEQ ID NO: 57911 - DNA, 80 bp, synthetic construct
  source 1..80: mol_type = other DNA
aagcctcccgggccatcacggacactttgggtaactcttacagtggagggtaagtcacccttcttaatcaatatggaggc

SEQ ID NO: 57912 - DNA, 80 bp, synthetic construct; identical to SEQ ID NO: 15137
  source 1..80: mol_type = other DNA

SEQ ID NO: 57913 - DNA, 80 bp, synthetic construct
  source 1..80: mol_type = other DNA
gccagtatcccatcccacagcatgctttaaaaggattaaatcctgttatcactcacctgttacagcatggccttttaaag

SEQ ID NO: 57914 - DNA, 80 bp, synthetic construct
  source 1..80: mol_type = other DNA
caacccattattctgttctagataaacctagctgaccccatagatcctaaatcctttctcctctcccctttccattcctt

SEQ ID NO: 57915 - DNA, 80 bp, synthetic construct
  source 1..80: mol_type = other DNA
ccatcatgtctccgtgcagtggctgccactgccctaatacttttacaggccctcaaaatcacaaactatgctcaactcac

SEQ ID NO: 57916 - DNA, 80 bp, synthetic construct
  source 1..80: mol_type = other DNA
cacacctgacccccatgactgtatctctctgatccacctgacattcaccccatttccccgtatttccttctttcctgttc

SEQ ID NO: 57917 - DNA, 80 bp, synthetic construct; identical to SEQ ID NO: 15138
  source 1..80: mol_type = other DNA

SEQ ID NO: 57918 - DNA, 80 bp, synthetic construct
  source 1..80: mol_type = other DNA
cagggcaatgcttttgctgataaggtagctaaagaagcagctagcattccaaattctgtccctcacggccaatttttctc

SEQ ID NO: 57919 - DNA, 80 bp, synthetic construct
  source 1..80: mol_type = other DNA
ttctattctgctgtcatttcataacctcttccatgtaagttacaagctgctagcccacctcttagaacctctcatttcct

SEQ ID NO: 57920 - DNA, 80 bp, synthetic construct
  source 1..80: mol_type = other DNA
ccaagtcaggaaactaaaatacctcttggtctgggtagacactttcactggatgggtagaggcctttccaacagggtctg

SEQ ID NO: 57921 - DNA, 80 bp, synthetic construct; identical to SEQ ID NO: 15139
  source 1..80: mol_type = other DNA

SEQ ID NO: 57922 - DNA, 80 bp, synthetic construct
  source 1..80: mol_type = other DNA
aaacttgtcatcccttctatcttctgtctagtcatactcctattcaccattctcaactactcataaatgccctgctcttg

SEQ ID NO: 57923 - DNA, 80 bp, synthetic construct
  source 1..80: mol_type = other DNA
acttttatactcactcctattcttgttcccatttttatgccaccctctacctctccccagctagctccaccacactatca

SEQ ID NO: 57924 - DNA, 80 bp, synthetic construct
  source 1..80: mol_type = other DNA
tcacctttaccttcctaaagaacttctttactttctagacaggtccagcaagacttccccagacatttcacttcagcaag

SEQ ID NO: 57925 - DNA, 80 bp, synthetic construct; identical to SEQ ID NO: 15140
  source 1..80: mol_type = other DNA

SEQ ID NO: 57926 - DNA, 80 bp, synthetic construct
  source 1..80: mol_type = other DNA
cagccccgtaaataacagtgaaaggttgctcgtagacactcaaagttttctcatacaccatgaaaatcaaacctccccct

SEQ ID NO: 57927 - DNA, 80 bp, synthetic construct
  source 1..80: mol_type = other DNA
tggatcctctacctacatgtgtctacctgctaattggacaggcacatgcacactagttttccttactcccaaaatcaatt

SEQ ID NO: 57928 - DNA, 80 bp, synthetic construct
  source 1..80: mol_type = other DNA
catagcctctctaatgacttctctgctagcatcacacacatatcacaaactttatcagtccttcaggcccaagttgactc

SEQ ID NO: 57929 - DNA, 80 bp, synthetic construct; identical to SEQ ID NO: 15141
  source 1..80: mol_type = other DNA

SEQ ID NO: 57930 - DNA, 80 bp, synthetic construct
  source 1..80: mol_type = other DNA
ttttttcctaaagatgataaccattcttttccagctgtcttttcttttttttttttttttttttgagacagagtctcact

SEQ ID NO: 57931 - DNA, 80 bp, synthetic construct
  source 1..80: mol_type = other DNA
gatggggtttcaccatgtcagctaggctggtcttgaactcctgaccttaggtgatccgcccgcctcagcctcccaaagtg

SEQ ID NO: 57932 - DNA, 80 bp, synthetic construct
  source 1..80: mol_type = other DNA
cacccattatctctccataccacctccaaaaattttcgcagccccaacacttcaccactattttgtttattaatataagg

SEQ ID NO: 57933 - DNA, 80 bp, synthetic construct; identical to SEQ ID NO: 15142
  source 1..80: mol_type = other DNA

SEQ ID NO: 57934 - DNA, 80 bp, synthetic construct
  source 1..80: mol_type = other DNA
tttcctaagccgtctggctagtagcccctaattgttcagctattcctctaacagcatctctagtgtagttaataaatcgc

SEQ ID NO: 57935 - DNA, 80 bp, synthetic construct
  source 1..80: mol_type = other DNA
aaagacccataaagggcttctcttgctttatgatacttatttttccttcctctcgttgatgaaataacagggtgaaaggg

SEQ ID NO: 57936 - DNA, 80 bp, synthetic construct
  source 1..80: mol_type = other DNA
caaggaatgctaagtttcctccctattgggagagacacgaagtgaacttagtgttgggagacagaagctggatggccctc

SEQ ID NO: 57937 - DNA, 80 bp, synthetic construct; identical to SEQ ID NO: 15143
  source 1..80: mol_type = other DNA

SEQ ID NO: 57938 - DNA, 80 bp, synthetic construct
  source 1..80: mol_type = other DNA
ggcataaaagctctacattgggggtcaagaatcctggttgacattgggatctttatcgaaatccccccggattcagtggt

SEQ ID NO: 57939 - DNA, 80 bp, synthetic construct
  source 1..80: mol_type = other DNA
tagatggtcagcaatagagcgaggaaaggagaaagagtaatagaatagatgaaagagttaaatttttcttagctttaatt

SEQ ID NO: 57940 - DNA, 80 bp, synthetic construct
  source 1..80: mol_type = other DNA
ttctttccaccctctgatgacaacatgatcttcaggctggtgctggtttaccagaaattttaggggtggtacctgtgcta

SEQ ID NO: 57941 - DNA, 80 bp, synthetic construct; identical to SEQ ID NO: 15144
  source 1..80: mol_type = other DNA

SEQ ID NO: 57942 - DNA, 80 bp, synthetic construct
  source 1..80: mol_type = other DNA
actacaggcacacgctgccacgcccggctaatttttttgtattttagtagagacggggtttcaccttgttgcccaggctg

SEQ ID NO: 57943 - DNA, 80 bp, synthetic construct
  source 1..80: mol_type = other DNA
agtttttgttttttgtttttttttttttttttgagatggagtcttgctctgtcgcccaggctgaaatgcagtggcacgat

SEQ ID NO: 57944 - DNA, 80 bp, synthetic construct
  source 1..80: mol_type = other DNA
agacagggttttacttgttagccagggtggtctctatctcctgacctcatgatccacccacctcggcctcccatagtgct

SEQ ID NO: 57945 - DNA, 80 bp, synthetic construct
  source 1..80: mol_type = other DNA
aattctcctgtctcagcctcccaagtagctgggattacaggcatgcaccaccacacccagctaattttggatttttagca

SEQ ID NO: 57946 - DNA, 80 bp, synthetic construct; identical to SEQ ID NO: 15145
  source 1..80: mol_type = other DNA

SEQ ID NO: 57947 - DNA, 80 bp, synthetic construct
  source 1..80: mol_type = other DNA
cgttcaagtgattctcctgcctcagcctcctgagtgagtagctgggattacaggtgcccaccacaacgcccagctaattt

SEQ ID NO: 57948 - DNA, 80 bp, synthetic construct
  source 1..80: mol_type = other DNA
gtaggtaaaaatccacattcttatgcctccttataatccttttactaaaagtatattttactttccttatacatcttgca

SEQ ID NO: 57949 - DNA, 80 bp, synthetic construct
  source 1..80: mol_type = other DNA
gcttgatacatcgcttcctttcaacccccacatcctcaccccctgtttgtttgatcaccaataaatagtgtgggcttcca

SEQ ID NO: 57950 - DNA, 80 bp, synthetic construct; identical to SEQ ID NO: 15146
  source 1..80: mol_type = other DNA

SEQ ID NO: 57951 - DNA, 80 bp, synthetic construct
  source 1..80: mol_type = other DNA
tacttctatatagaagggtgcacccttacagatggaacaatggtgagcgcacacttggacaagggaggggaaggggttct

SEQ ID NO: 57952 - DNA, 80 bp, synthetic construct
  source 1..80: mol_type = other DNA
agttagggtggagcaggagatcagaatgagtcagggtggagtaggtaatcaaaaaagattgctttacgaggaagttaagt

SEQ ID NO: 57953 - DNA, 80 bp, synthetic construct
  source 1..80: mol_type = other DNA
caggagagatgctaagatgccatggagtgcccatttggccactggcagtctgggcaggttgcccctttctgggtttgtgg

SEQ ID NO: 57954 - DNA, 80 bp, synthetic construct; identical to SEQ ID NO: 15147
  source 1..80: mol_type = other DNA

SEQ ID NO: 57955 - DNA, 80 bp, synthetic construct
  source 1..80: mol_type = other DNA
tgctgtcatcttcagaagatagacgcagcagtaaggaatatttgttttgcttttttataaaatgtttaaaagcactgtgg

SEQ ID NO: 57956 - DNA, 80 bp, synthetic construct
  source 1..80: mol_type = other DNA
gtcccagctactcgggaggctgaggcaggagaatgctgggagtggtggcatgcgcctgtagttccagctactctggaggt

SEQ ID NO: 57957 - DNA, 80 bp, synthetic construct
  source 1..80: mol_type = other DNA
agtgttagcacaatcgctcaagaggcacccaatgtagagaaacgacggtgaggttagcagtaccaaggagcagggtttga

SEQ ID NO: 57958 - DNA, 80 bp, synthetic construct; identical to SEQ ID NO: 15148
  source 1..80: mol_type = other DNA

SEQ ID NO: 57959 - DNA, 80 bp, synthetic construct
  source 1..80: mol_type = other DNA
caaaatggtgtctcctatgtctacttctttctatgcagacacagtaacaatctgatctctctttcttttccccacatttc

SEQ ID NO: 57960 - DNA, 80 bp, synthetic construct
  source 1..80: mol_type = other DNA
gacggggcggccgaatcccggctctttcatgttttagctgttgggctttggggaagttattctacctctttcagcctgtg

SEQ ID NO: 57961 - DNA, 80 bp, synthetic construct
  source 1..80: mol_type = other DNA
ttaaaaattatctgggcatggtagcacacgcctgcagttccagctactcaggaggctgaggtgggaggatcacttgagcc

SEQ ID NO: 57962 - DNA, 80 bp, synthetic construct; identical to SEQ ID NO: 15149
  source 1..80: mol_type = other DNA

SEQ ID NO: 57963 - DNA, 80 bp, synthetic construct
  source 1..80: mol_type = other DNA
tttggtaatccttgtaacctggttccctatcttaatgaaaaaaaccaatggttctggctttattacctaaagaaaggaat

SEQ ID NO: 57964 - DNA, 80 bp, synthetic construct
  source 1..80: mol_type = other DNA
gcagtcaggagtttgagaccatcctggccaacatggtgaaaccccgtctctactaaaaatacaaaaattagccgggtgtt

SEQ ID NO: 57965 - DNA, 80 bp, synthetic construct
  source 1..80: mol_type = other DNA
aaatgaagagttccttttctcaacactctcatcaatacatgcatgcacacacactcttgcatgcagccatgaattctcat

SEQ ID NO: 57966 - DNA, 80 bp, synthetic construct; identical to SEQ ID NO: 15150
  source 1..80: mol_type = other DNA

SEQ ID NO: 57967 - DNA, 80 bp, synthetic construct
  source 1..80: mol_type = other DNA
ttttctgcattcatttagctcccatttaacataatcaagagccagatctagaatcaagtttctaccaaaggaggaggtaa

SEQ ID NO: 57968 - DNA, 80 bp, synthetic construct
  source 1..80: mol_type = other DNA
aagataagatatgaaaagaataaaagagaagcctaccacttctcatcttggagtttcaacaagacgaaggcagggaggtg

SEQ ID NO: 57969 - DNA, 80 bp, synthetic construct
  source 1..80: mol_type = other DNA
cactggcagggagacagggtctgttttgtgttaccagcccttttccagtgatgggtattgaattgagagccatgggcctg

SEQ ID NO: 57970 - DNA, 80 bp, synthetic construct
  source 1..80: mol_type = other DNA
agatcagatccagccaagagatccacgagaaactctaaatgttgactttagccaaaggcccccaggatgaatgtgaccaa

SEQ ID NO: 57971 - DNA, 80 bp, synthetic construct; identical to SEQ ID NO: 15151
  source 1..80: mol_type = other DNA

SEQ ID NO: 57972 - DNA, 80 bp, synthetic construct
  source 1..80: mol_type = other DNA
gtcacacagcaaaggggatggatgtacacttaaataataaggaggaagcaaaggattgggaataacagtccaaaccacca

SEQ ID NO: 57973 - DNA, 80 bp, synthetic construct
  source 1..80: mol_type = other DNA
gggtcttagataatatcgttagggggcttactggctgctgacctccggacatttttgaaatatgaaacaattaaatgtct

SEQ ID NO: 57974 - DNA, 80 bp, synthetic construct
  source 1..80: mol_type = other DNA
ctgcaacctccacctcccgagttcaagtgattctcccaccttagcctccccagtagctgggactacaggcatgtgccact

SEQ ID NO: 57975 - DNA, 80 bp, synthetic construct; identical to SEQ ID NO: 15152
  source 1..80: mol_type = other DNA

SEQ ID NO: 57976 - DNA, 80 bp, synthetic construct
  source 1..80: mol_type = other DNA
gtcttatgtacttgtagtttattcaaaggataaagtggtaaaatgccctcatagtgaaaaagtgaaaggtctgtgcatgg

SEQ ID NO: 57977 - DNA, 80 bp, synthetic construct
  source 1..80: mol_type = other DNA
atttagtcaaacctgcttgcttgaatcaggccctctcaagtacctcctcccttcattactctattctcctttgagatact

SEQ ID NO: 57978 - DNA, 80 bp, synthetic construct
  source 1..80: mol_type = other DNA
catggtctgcccccaggaggtgctcagtcaggatttactaataaacaaacaaaccatcatctagtattaaggactgatga

SEQ ID NO: 57979 - DNA, 80 bp, synthetic construct; identical to SEQ ID NO: 15153
  source 1..80: mol_type = other DNA

SEQ ID NO: 57980 - DNA, 80 bp, synthetic construct
  source 1..80: mol_type = other DNA
gacgcctgtaatcccagcactttgggaggccgaggcgggtagatcacgaggtcaggaaatcgagaccatcctggctaaca

SEQ ID NO: 57981 - DNA, 80 bp, synthetic construct
  source 1..80: mol_type = other DNA
gggcgacagagtgagactccgtctcaaaaaaaaaaacaaaacaaaaacaaaaacaaaacaaaacaaaaaaactggaaaat

SEQ ID NO: 57982 - DNA, 80 bp, synthetic construct
  source 1..80: mol_type = other DNA
aagcttcactgacctcctatgatgatggggcccctggtgctgacacagctcagcctctttatgagaggctcctgcacaga

SEQ ID NO: 57983 - DNA, 80 bp, synthetic construct; identical to SEQ ID NO: 15154
  source 1..80: mol_type = other DNA

SEQ ID NO: 57984 - DNA, 80 bp, synthetic construct
  source 1..80: mol_type = other DNA
tgaagtttatgatgagaactggagaatgagtagaaattagccccgtaaaagaatgggggcgaagaggcttactgttttat

SEQ ID NO: 57985 - DNA, 80 bp, synthetic construct
  source 1..80: mol_type = other DNA
attcgagaccagcctggggaagccaacatggagaaaccttgtctctactaaaaatacaaaaattaaccgggcgtggtggt

SEQ ID NO: 57986 - DNA, 80 bp, synthetic construct
  source 1..80: mol_type = other DNA
gactccgtctcaaaaacataaaaaaaaacaaagaaaagaaaactaaaaacaaacaagcaaagaaaaaaaaatgcctttca

SEQ ID NO: 57987 - DNA, 80 bp, synthetic construct; identical to SEQ ID NO: 15155
  source 1..80: mol_type = other DNA

SEQ ID NO: 57988 - DNA, 80 bp, synthetic construct
  source 1..80: mol_type = other DNA
aaaggaaagctataggctaatctcactgacaaacatacctggaaaaatcctaaataaaagttttgcaaatgaaaccaagc

SEQ ID NO: 57989 - DNA, 80 bp, synthetic construct
  source 1..80: mol_type = other DNA
tagcatataatgtatcactaccacattcctttttttttttctttccttgagacagggtcttaccattgcccaggctggag

SEQ ID NO: 57990 - DNA, 80 bp, synthetic construct
  source 1..80: mol_type = other DNA
tttttttttttgaggaagcaatttctttaattttatcagaatccaggacacaagaagaaaaacacccaaaaaccacatgg

SEQ ID NO: 57991 - DNA, 80 bp, synthetic construct; identical to SEQ ID NO: 15156
  source 1..80: mol_type = other DNA

SEQ ID NO: 57992 - DNA, 80 bp, synthetic construct
  source 1..80: mol_type = other DNA
ccaaagtggggctagtgagtgaggtcctgagtgagtgggtcagtggctgggcctctttctccagctgcctgtagcccctc

SEQ ID NO: 57993 - DNA, 80 bp, synthetic construct
  source 1..80: mol_type = other DNA
ggtggggacaggggctcgaccagctcagacccaagatggtgccatgcttacttgctgagtcccccatgagctggggtact

SEQ ID NO: 57994 - DNA, 80 bp, synthetic construct
  source 1..80: mol_type = other DNA
ctggcaggtgtgacaacagaccggagcttctcagccatcagggccccaaaccgtacgggcaccatggggtccagctcccc

SEQ ID NO: 57995 - DNA, 80 bp, synthetic construct; identical to SEQ ID NO: 15157
  source 1..80: mol_type = other DNA

SEQ ID NO: 57996 - DNA, 80 bp, synthetic construct
  source 1..80: mol_type = other DNA
ctgtgccctgtgtctccaagtccatgtaaaaaaataaccacggccgtttcccgctcagctccagacacggtggcagcatc

SEQ ID NO: 57997 - DNA, 80 bp, synthetic construct
  source 1..80: mol_type = other DNA
tttttttatttttttatttttagtggacatggggtctccctatgttacttacctagcctggtctcaaactcctaggctcc

SEQ ID NO: 57998 - DNA, 80 bp, synthetic construct
  source 1..80: mol_type = other DNA
ctcccaggctcaagtgatcctcccatctcaacctccctagtagctggcattcctttttatggctgaataatactccattg

SEQ ID NO: 57999 - DNA, 80 bp, synthetic construct; identical to SEQ ID NO: 15158
  source 1..80: mol_type = other DNA

SEQ ID NO: 58000 - DNA, 80 bp, synthetic construct
  source 1..80: mol_type = other DNA
tgaggcaggagaatcgcctgaactcgggaggcagattttgcagtaaaccaagattgtgccattgcactccagcctaggcc

SEQ ID NO: 58001 - DNA, 80 bp, synthetic construct
  source 1..80: mol_type = other DNA
ttaaagcaagaatgaaagaacagagagggtgagtggggactcaatgacgtcagagaagtgacagattacaaaaagtggga

SEQ ID NO: 58002 - DNA, 80 bp, synthetic construct; identical to SEQ ID NO: 15159
  source 1..80: mol_type = other DNA

SEQ ID NO: 58003 - DNA, 80 bp, synthetic construct
  source 1..80: mol_type = other DNA
gcgcctgtaatcccagctactcaggaggctgaggcaggagaattgcttgaacccgagaggtggaggttgcagtgagctaa

SEQ ID NO: 58004 - DNA, 80 bp, synthetic construct
  source 1..80: mol_type = other DNA
actgcaacctccgcctccctggttcacgccattctccttcctcagcctcccaggtagctgggactacaggcgcctgccaa

SEQ ID NO: 58005 - DNA, 80 bp, synthetic construct
  source 1..80: mol_type = other DNA
gtaccttttgaaatatatgtaaatatgctggttttgcaaacattaaattaataataaaagccatgccatagcagactaca

SEQ ID NO: 58006 - DNA, 80 bp, synthetic construct; identical to SEQ ID NO: 15160
  source 1..80: mol_type = other DNA

SEQ ID NO: 58007 - DNA, 80 bp, synthetic construct
  source 1..80: mol_type = other DNA
taattcccgttactcaggaggcagaggcaggagagttgcttgaacccagggagggggtgggggcgcagaggttgtagtga

SEQ ID NO: 58008 - DNA, 80 bp, synthetic construct
  source 1..80: mol_type = other DNA
aaggcgacattcattaaattggcaaagacaggtttgggaatatcagatgttgctgaagctccagggcaacagggactttc

SEQ ID NO: 58009 - DNA, 80 bp, synthetic construct
  source 1..80: mol_type = other DNA
ttctagtggatgggagcgtaaaccagaaaaaccactgtggagaccatttggcaatatctagtagagttgataatacaact

SEQ ID NO: 58010 - DNA, 80 bp, synthetic construct; identical to SEQ ID NO: 15161
  source 1..80: mol_type = other DNA

SEQ ID NO: 58011 - DNA, 80 bp, synthetic construct
  source 1..80: mol_type = other DNA
ctactaaaaatacacaaattagctgggtgtggtggcacatgcctatagtcccagctactcaggaggctgaggcaagagaa

SEQ ID NO: 58012 - DNA, 80 bp, synthetic construct
  source 1..80: mol_type = other DNA
ttagacaatgctgatatagaaaatttccatcattgcagaaagttctattggacagcactgttctacaacataaaatgagc

SEQ ID NO: 58013 - DNA, 80 bp, synthetic construct
  source 1..80: mol_type = other DNA
aatgtattgtaggcgcggtggctcacacctgtaatcccagcactttgcaaggctgaggagggcagatcacctgaggtcag

SEQ ID NO: 58014 - DNA, 80 bp, synthetic construct; identical to SEQ ID NO: 15162
  source 1..80: mol_type = other DNA

SEQ ID NO: 58015 - DNA, 80 bp, synthetic construct
  source 1..80: mol_type = other DNA
acttgggaggctgaggcagaagaatggcatgaacccaggaggcggagcttgcagtgagccgagatcgcgccactgcactt

SEQ ID NO: 58016 - DNA, 80 bp, synthetic construct
  source 1..80: mol_type = other DNA
agatttagtcattccaagtttatatatgcttcaaaatagcatgtaatacctatggaaactaagaattaggctgggcacag

SEQ ID NO: 58017 - DNA, 80 bp, synthetic construct
  source 1..80: mol_type = other DNA
aattagctgggagtggtggctggagcctgtagtcccagctataggctgaggtgggaggatcactggagcccaggtgtttg

SEQ ID NO: 58018 - DNA, 80 bp, synthetic construct; identical to SEQ ID NO: 15163
  source 1..80: mol_type = other DNA

SEQ ID NO: 58019 - DNA, 80 bp, synthetic construct
  source 1..80: mol_type = other DNA
ataaataatcaaaccaaaaccaaaccatcatgtcctatatgataaatatgtaaaatttatctgtcagtttaaaaataata

SEQ ID NO: 58020 - DNA, 80 bp, synthetic construct
  source 1..80: mol_type = other DNA
tgggaggccgaggcaggtggatcatgaggtcaggagattgagaccaaaaaaaaaaaatttttttgagacagagtactctg

SEQ ID NO: 58021 - DNA, 80 bp, synthetic construct
  source 1..80: mol_type = other DNA
gccatgttggccaggctggtctcgaactccttacctcaggtgatctgcccatctcggcctcccaaagtactgagattaca

SEQ ID NO: 58022 - DNA, 80 bp, synthetic construct; identical to SEQ ID NO: 15164
  source 1..80: mol_type = other DNA

SEQ ID NO: 58023 - DNA, 80 bp, synthetic construct
  source 1..80: mol_type = other DNA
ctcaaaagaaaaaaaaaaagaattgatgggttggcagggtactgacacttggaggtgctgggagggtggtgcccagatgg

SEQ ID NO: 58024 - DNA, 80 bp, synthetic construct
  source 1..80: mol_type = other DNA
gggttgtaggaaccctgatttatagcaggtttgtcagaagcacagatcacagccttggtcttggaattggcatctaaagt

SEQ ID NO: 58025 - DNA, 80 bp, synthetic construct
  source 1..80: mol_type = other DNA
tttgtgttgtgtgagcagacagggagggtcttcagggattacagaaatttaatcaccctgagcaattggcttgttttaca

SEQ ID NO: 58026 - DNA, 80 bp, synthetic construct; identical to SEQ ID NO: 15165
  source 1..80: mol_type = other DNA

SEQ ID NO: 58027 - DNA, 80 bp, synthetic construct
  source 1..80: mol_type = other DNA
aggcaaacaaaccctgttttttttcaggtaacaagagtatggtggaagaaaacagtttaggtcaggcacagtggtgcatg

SEQ ID NO: 58028 - DNA, 80 bp, synthetic construct
  source 1..80: mol_type = other DNA
ggcaggcggatcacttgaggtcaagagttggagaccagcctgggcaacatggtgaaaccccgtttctattcaaaatataa

SEQ ID NO: 58029 - DNA, 80 bp, synthetic construct
  source 1..80: mol_type = other DNA
aaaaaaaaaagaggccaggcacagtggctcacacctgtaatcctagcactttgggaggccgaagcgggtggctcacctga

SEQ ID NO: 58030 - DNA, 80 bp, synthetic construct; identical to SEQ ID NO: 15166
  source 1..80: mol_type = other DNA

SEQ ID NO: 58031 - DNA, 80 bp, synthetic construct
  source 1..80: mol_type = other DNA
aagttcctttatctgcttcaagtccagacataccacaaagaataattgttttctcttcccctccctgtaagatcaggaat

SEQ ID NO: 58032 - DNA, 80 bp, synthetic construct
  source 1..80: mol_type = other DNA
taacctgttttgccaggatggtaaataagctcctgaaccctgttgtggattggttaatcactctgtggttctctctgtgt

SEQ ID NO: 58033 - DNA, 80 bp, synthetic construct
  source 1..80: mol_type = other DNA
tctcctgtctcagcttcccgagtagctgggattacaagcacacgccactgtgcccagctaatttttatattttcaccatg

SEQ ID NO: 58034 - DNA, 80 bp, synthetic construct; identical to SEQ ID NO: 15167
  source 1..80: mol_type = other DNA

SEQ ID NO: 58035 - DNA, 80 bp, synthetic construct
  source 1..80: mol_type = other DNA
ctaatgggcagagccgtcacaatgcactggttgaaatggtgcaaaaaaataatgtaaggcttttttttttttggtacagg

SEQ ID NO: 58036 - DNA, 80 bp, synthetic construct
  source 1..80: mol_type = other DNA
gatggggtttcaccgtgttaactaggctggtctcataaccgcccaatgtgtttaccttgcccgctgcctagacagagccg

SEQ ID NO: 58037 - DNA, 80 bp, synthetic construct
  source 1..80: mol_type = other DNA
gagtctctctctgtcacccaggctggagtgcaatggcaaaatcttggctcactgcaacctccacctcccaggttcaagtg

SEQ ID NO: 58038 - DNA, 80 bp, synthetic construct; identical to SEQ ID NO: 15168
  source 1..80: mol_type = other DNA

SEQ ID NO: 58039 - DNA, 80 bp, synthetic construct
  source 1..80: mol_type = other DNA
tcaagcactgatcttaggagatgtttagggagggtcagaatcttgtagccttcacctgcatgactcctaaaccgtaattt

SEQ ID NO: 58040 - DNA, 80 bp, synthetic construct
  source 1..80: mol_type = other DNA
acatgccaccacgcccagctactttttgtatttttagtagagataggggttcatgatattggtcaggctggtctcgaact

SEQ ID NO: 58041 - DNA, 80 bp, synthetic construct
  source 1..80: mol_type = other DNA
aaagggctattaaaacaaagggaaagggctattattgtctttgttttaaattataaaccaagtttctcccaaagttagtt

SEQ ID NO: 58042 - DNA, 80 bp, synthetic construct; identical to SEQ ID NO: 15169
  source 1..80: mol_type = other DNA

SEQ ID NO: 58043 - DNA, 80 bp, synthetic construct
  source 1..80: mol_type = other DNA
gcgcctgtaatcccagctactcaggaggctgaggcaggagaatcatttgaacctgggaggtggaggctgcagtgagccga

SEQ ID NO: 58044 - DNA, 80 bp, synthetic construct
  source 1..80: mol_type = other DNA
aaatccataaagtgaaagcaagtttattagagaagttaagaaacgaaagaaggttactccaaaggcagtgcagccctgag

SEQ ID NO: 58045 - DNA, 80 bp, synthetic construct
  source 1..80: mol_type = other DNA
aaccagaggtcattctcatcgccatctttgtttcggtgggtttcagccggcttctttactgcaacctcttttatcagcaa

SEQ ID NO: 58046 - DNA, 80 bp, synthetic construct; identical to SEQ ID NO: 15170
  source 1..80: mol_type = other DNA

SEQ ID NO: 58047 - DNA, 80 bp, synthetic construct
  source 1..80: mol_type = other DNA
agactccgtctcaaaataaataaataaataaataaataaataaataaataaataaataaataattaaaaaaataaaaaat

SEQ ID NO: 58048 - DNA, 80 bp, synthetic construct
  source 1..80: mol_type = other DNA
accaccacatcaggctcagaagatcacttttaattagcaaacggctcactagcaagatttgaaaaacttcaaaaagctaa

SEQ ID NO: 58049 - DNA, 80 bp, synthetic construct
  source 1..80: mol_type = other DNA
aaattataatggtttccgtgaaatttaataatggttcaaaatttgtatcatttgagataagtgaggcatcagtgaattta

SEQ ID NO: 58050 - DNA, 80 bp, synthetic construct; identical to SEQ ID NO: 15171
  source 1..80: mol_type = other DNA

SEQ ID NO: 58051 - DNA, 80 bp, synthetic construct
  source 1..80: mol_type = other DNA
tcgccaagatcacgccactgcactctggcctaggcgacagagcaagactccatctcaaaaaaaaaaaaaaaaaaaaatag

SEQ ID NO: 58052 - DNA, 80 bp, synthetic construct
  source 1..80: mol_type = other DNA
ccatctcaaaaaaaaaaaaaaaaaaaaaaattagccaggcgcgatggcggttgcctgtaataccagctactcaagaggct

SEQ ID NO: 58053 - DNA, 80 bp, synthetic construct
  source 1..80: mol_type = other DNA
atcacattttgggaatgcattgactataccctaaaaagctcaggagaatatacagttgaggctgggtgtgatggctaacg

SEQ ID NO: 58054 - DNA, 80 bp, synthetic construct; identical to SEQ ID NO: 15172
  source 1..80: mol_type = other DNA

SEQ ID NO: 58055 - DNA, 80 bp, synthetic construct
  source 1..80: mol_type = other DNA
ttttgagacagagtctcactctgtcgcccaggctggagtgcagaggtgtgatctcggctcactgcaacctccacctcccg

SEQ ID NO: 58056 - DNA, 80 bp, synthetic construct
  source 1..80: mol_type = other DNA
ctcccaaagtgctgggattacaggtgtggcgctcatgtattttgtaatatattttcttttcttctttctttttttttttt

SEQ ID NO: 58057 - DNA, 80 bp, synthetic construct
  source 1..80: mol_type = other DNA
aaatttgtttatgtatttgcttataccctgcacaccctaagtgcagtgtagcctcaacatgtccaagcagagcccttgac

SEQ ID NO: 58058 - DNA, 80 bp, synthetic construct; identical to SEQ ID NO: 15173
  source 1..80: mol_type = other DNA

SEQ ID NO: 58059 - DNA, 80 bp, synthetic construct
  source 1..80: mol_type = other DNA
taaagtcccatgatctgatatgttcccttatcaactaacaagggccctacagttaagaaaaccaaagttacttctggctg

SEQ ID NO: 58060 - DNA, 80 bp, synthetic construct
  source 1..80: mol_type = other DNA
cagctactcaggaggctgaggcagagaattgcttaaacctgggaggcggaggttgcagtgagccgagatcgcaccactgc

SEQ ID NO: 58061 - DNA, 80 bp, synthetic construct
  source 1..80: mol_type = other DNA
taaactctctaacaatagggagttaggagctatcagacccctcttaactatgatttacaacccagatcactacaactccg

SEQ ID NO: 58062 - DNA, 80 bp, synthetic construct
  source 1..80: mol_type = other DNA
cctcagcctcctgaatagctgggactacaggtgtgccaccatgcccggccaattttttttgtattttcagtagagatggg

SEQ ID NO: 58063 - DNA, 80 bp, synthetic construct; identical to SEQ ID NO: 15174
  source 1..80: mol_type = other DNA

SEQ ID NO: 58064 - DNA, 80 bp, synthetic construct
  source 1..80: mol_type = other DNA
ctaacctgggagagcagaaggtcagcacatcaattgaagagaagagaggacattaatgggaagagcctgttgggttgtgg

SEQ ID NO: 58065 - DNA, 80 bp, synthetic construct
  source 1..80: mol_type = other DNA
actcctttgactacctgccactctaaggtaacagagataccaccacagttggaacacaaagaatgggggcgggggagcca

SEQ ID NO: 58066 - DNA, 80 bp, synthetic construct
  source 1..80: mol_type = other DNA
tggcacaggctggcccttggctctgtagagtgacttaggaaatttcaaggaagatactccaaagtgcagagtcccttcaa

SEQ ID NO: 58067 - DNA, 80 bp, synthetic construct; identical to SEQ ID NO: 15175
  source 1..80: mol_type = other DNA

SEQ ID NO: 58068 - DNA, 80 bp, synthetic construct
  source 1..80: mol_type = other DNA
ttctcctgcctcagcctcccaactcccaagtagctgggattacaggcacatgccaccacgcccagctaatttttgtattt

SEQ ID NO: 58069 - DNA, 80 bp, synthetic construct
  source 1..80: mol_type = other DNA
ttgacggggaagggcatactccttcctttagggctctccctgaaatgtggatatattacttccatttgtgctctattggc

SEQ ID NO: 58070 - DNA, 80 bp, synthetic construct
  source 1..80: mol_type = other DNA
tcagtgtcagtatcagtattatgctcagctgtgagaggctggaccaaggttgagagcctgagccacagcaccctgtgtgg

SEQ ID NO: 58071 - DNA, 80 bp, synthetic construct; identical to SEQ ID NO: 15176
  source 1..80: mol_type = other DNA

SEQ ID NO: 58072 - DNA, 80 bp, synthetic construct
  source 1..80: mol_type = other DNA
gctgctgctgctcagggatacgtacaattgtacagactgtgctaagaacttcacatgcatgatctcttttagtttttgtc

SEQ ID NO: 58073 - DNA, 80 bp, synthetic construct
  source 1..80: mol_type = other DNA
tttttaaaattattattattatttttatcgagaaggagtctcgctgtgttagcccaggctggagttcagtggtgcgatct

SEQ ID NO: 58074 - DNA, 80 bp, synthetic construct
  source 1..80: mol_type = other DNA
cctcatgatccgcctgcctcaccctcccaaagtgctgggattacaggcgtgagccactgcacccagccataagtgtttct

SEQ ID NO: 58075 - DNA, 80 bp, synthetic construct; identical to SEQ ID NO: 15177
  source 1..80: mol_type = other DNA

SEQ ID NO: 58076 - DNA, 80 bp, synthetic construct
  source 1..80: mol_type = other DNA
ctgcccttttttttttttctttgaagacaggatctcactctgtcacccaggctgaagtacagtggtgtgatcattactca

SEQ ID NO: 58077 - DNA, 80 bp, synthetic construct
  source 1..80: mol_type = other DNA
acccactttggcctcccaaagtcctgggactacgggcatgagctactgtgcctggtctagactccccctttttttttttt

SEQ ID NO: 58078 - DNA, 80 bp, synthetic construct
  source 1..80: mol_type = other DNA
tatttttagtagagatagggtttctccatgctggtcaggctggtctcaactccccacctcaggtgatctgccagcctcag

SEQ ID NO: 58079 - DNA, 80 bp, synthetic construct
  source 1..80: mol_type = other DNA
cagcctcccaagtagctgggattacaggcacccaccaccacgcccagccaatttttgtatttttagtagagatggtgttt

SEQ ID NO: 58080 - DNA, 80 bp, synthetic construct; identical to SEQ ID NO: 15178
  source 1..80: mol_type = other DNA

SEQ ID NO: 58081 - DNA, 80 bp, synthetic construct
  source 1..80: mol_type = other DNA
ttacacaagcattctcagcccaacttgcctcccctcctatttctatctctacctttagctgggtatttggatagttcagg

SEQ ID NO: 58082 - DNA, 80 bp, synthetic construct
  source 1..80: mol_type = other DNA
caaaaccctgtctctacaaaaaatacaaaatttagctgggcatggggtgcaggcttgcagtcccagctatttgcgggggg

SEQ ID NO: 58083 - DNA, 80 bp, synthetic construct
  source 1..80: mol_type = other DNA
cacaaaaatatatcattatgcatttctgaaagcaaatgtgctataatactgctttgatctgaatgtcccccaaaattcat

SEQ ID NO: 58084 - DNA, 80 bp, synthetic construct; identical to SEQ ID NO: 15179
  source 1..80: mol_type = other DNA

SEQ ID NO: 58085 - DNA, 80 bp, synthetic construct
  source 1..80: mol_type = other DNA
aaaattctggatttggaatctatcttggcaagataatacatagatatgattataagaaaatcagtgaggtcataaacagt

SEQ ID NO: 58086 - DNA, 80 bp, synthetic construct
  source 1..80: mol_type = other DNA
agtagccaattactgccaggcatagtggctcaaacctgtaatcccagcactttgggaggccaaggtgggaggactgcatg

SEQ ID NO: 58087 - DNA, 80 bp, synthetic construct
  source 1..80: mol_type = other DNA
cagaccagcctagccaacatggtgaaaccccctctctactaaaaatacaaaaattagcctggcatggtggtgcacacctg

SEQ ID NO: 58088 - DNA, 80 bp, synthetic construct; identical to SEQ ID NO: 15180
  source 1..80: mol_type = other DNA

SEQ ID NO: 58089 - DNA, 80 bp, synthetic construct
  source 1..80: mol_type = other DNA
atcgcttgaacccgtgaggcagaggttgcagtgagccgagaacacgccactgcactccagcctgggggacagtgcaagac

SEQ ID NO: 58090 - DNA, 80 bp, synthetic construct
  source 1..80: mol_type = other DNA
cgggcgcctgtagtcccagctacttgggaggctgaggcaggagaatggcatgaaccccggaggcagagcttgcagcaagc

SEQ ID NO: 58091 - DNA, 80 bp, synthetic construct
  source 1..80: mol_type = other DNA
caaatgttggttcattgtgatttggagtctaccattactataactgtatctgtacctataccaatatctgtacctgtacc

SEQ ID NO: 58092 - DNA, 80 bp, synthetic construct; identical to SEQ ID NO: 15181
  source 1..80: mol_type = other DNA

SEQ ID NO: 58093 - DNA, 80 bp, synthetic construct
  source 1..80: mol_type = other DNA
cttctgccttggccttccaaagtgctgggattataggcatgatccaccatgcctggcaatttttttttaagagcacaaat

SEQ ID NO: 58094 - DNA, 80 bp, synthetic construct
  source 1..80: mol_type = other DNA
ctctgcctcagcctcccaagtagctgggattacaggtgcccgccaccacacccggcttttttgtatttttagtagagacg

SEQ ID NO: 58095 - DNA, 80 bp, synthetic construct
  source 1..80: mol_type = other DNA
attagtttaaatccttgaagggtacagcatcactcggattctgtgtccaatagccttagtgggaagattgcttcagaatt

SEQ ID NO: 58096 - DNA, 80 bp, synthetic construct
  source 1..80: mol_type = other DNA
tggcgcgatctccgctcactgcaagctccgcctgccgggttcacgccattctcctgcctcagcctcctgagtagctggga

SEQ ID NO: 58097 - DNA, 80 bp, synthetic construct; identical to SEQ ID NO: 15182
  source 1..80: mol_type = other DNA

SEQ ID NO: 58098 - DNA, 80 bp, synthetic construct
  source 1..80: mol_type = other DNA
attaatgtttcttgtagtccttatatatttgttgcttattggactggctacaacttccattgttttattgatgaggatta

SEQ ID NO: 58099 - DNA, 80 bp, synthetic construct
  source 1..80: mol_type = other DNA
ttgctgcatcaattgagatgaatacattttccccctttaatctgctaatgggtctatatttctccattccatttaaattt

SEQ ID NO: 58100 - DNA, 80 bp, synthetic construct
  source 1..80: mol_type = other DNA
caaaggttggggggatggcaacatggttttcagacagtgtgtctccccacaatctgcttctctctacaagcttgtttgaa

SEQ ID NO: 58101 - DNA, 80 bp, synthetic construct; identical to SEQ ID NO: 15183
  source 1..80: mol_type = other DNA

SEQ ID NO: 58102 - DNA, 80 bp, synthetic construct
  source 1..80: mol_type = other DNA
tacaaagaatgtggcacaatgtaggaactcagtgaattttcgtgattaaaagacgagataatacaggtgcacaatctgca

SEQ ID NO: 58103 - DNA, 80 bp, synthetic construct
  source 1..80: mol_type = other DNA
tataaagaaaagttctttcctgagctttgaatccccactgtcaggcttcaatggagcgcaaaaattcctaaatttggtga

SEQ ID NO: 58104 - DNA, 80 bp, synthetic construct
  source 1..80: mol_type = other DNA
cacgtcgacggaaaacaagtgcgctccctactgcagtcaccaggaggcgctagtcccgcctgtctcccggcacgggtcct

SEQ ID NO: 58105 - DNA, 80 bp, synthetic construct
  source 1..80: mol_type = other DNA
cgctagaggaggggaggggtgagaagcataagtggcaccggaagtggaattaatccgcctacctctcctgcgcctgcgaa

SEQ ID NO: 58106 - DNA, 80 bp, synthetic construct; identical to SEQ ID NO: 15184
  source 1..80: mol_type = other DNA

SEQ ID NO: 58107 - DNA, 80 bp, synthetic construct
  source 1..80: mol_type = other DNA
ctttgtcatgtctaccgggagagcgaaggtccgtgcgcccccgcacaagtggaaaggggcggaggcaggagtggagacgg

SEQ ID NO: 58108 - DNA, 80 bp, synthetic construct
  source 1..80: mol_type = other DNA
gtctgacacatttccacttctttattcctactcagggtgtgattgcagtgtgtaagaagggagagttctgatatgacttc

SEQ ID NO: 58109 - DNA, 80 bp, synthetic construct
  source 1..80: mol_type = other DNA
tgggccaaaagacttctcattctctctctcctttcccaaattgtgcagattcctgcccaatgaaactgattgatttagtt

SEQ ID NO: 58110 - DNA, 80 bp, synthetic construct
  source 1..80: mol_type = other DNA
tgcctgaatcctttgtttactagtatttcacgttcaggtttccctgaagttaggattcagccttaagagagattctttct

SEQ ID NO: 58111 - DNA, 80 bp, synthetic construct; identical to SEQ ID NO: 15185
  source 1..80: mol_type = other DNA

SEQ ID NO: 58112 - DNA, 80 bp, synthetic construct
  source 1..80: mol_type = other DNA
acatttcaggcagagggaatctgctagagcagagtccctaaagagttgtaaggagggaagtgtggctggaatgaagtgag

SEQ ID NO: 58113 - DNA, 80 bp, synthetic construct
  source 1..80: mol_type = other DNA
atgattttaagcagagagataagatttgttgggtccaccagattttcgtaaccatagcaccattgccttttttttttttt

SEQ ID NO: 58114 - DNA, 80 bp, synthetic construct
  source 1..80: mol_type = other DNA
ttttttgtatttttaatagagacagggttttgccatgttgcccaggctggtctggaactaactcctgggctcaagcaatt

SEQ ID NO: 58115 - DNA, 80 bp, synthetic construct
  source 1..80: mol_type = other DNA
gcgattctcctgcctcagcctcccgagtagctgggactacaggcgcctgccaccacgcccggctaattttttgtattttt

SEQ ID NO: 58116 - DNA, 80 bp, synthetic construct; identical to SEQ ID NO: 15186
  source 1..80: mol_type = other DNA

SEQ ID NO: 58117 - DNA, 80 bp, synthetic construct
  source 1..80: mol_type = other DNA
agattagatgtggtatgtaggagaaagagaggactctgggtttttggcttgagcaactgaaagatggagttatatcaatt

SEQ ID NO: 58118 - DNA, 80 bp, synthetic construct
  source 1..80: mol_type = other DNA
acctcccagcttcaagcaatcctcccacctcaatctcccgagtagctgggattacaggcacgtgccagcacacctggcta

SEQ ID NO: 58119 - DNA, 80 bp, synthetic construct
  source 1..80: mol_type = other DNA
tcagtataggtgcaggatcgaggtctgagctggacatataaatttggaaactgtcagcatatcaatgatatttaaaggca

SEQ ID NO: 58120 - DNA, 80 bp, synthetic construct; identical to SEQ ID NO: 15187
  source 1..80: mol_type = other DNA

SEQ ID NO: 58121 - DNA, 80 bp, synthetic construct
  source 1..80: mol_type = other DNA
tagggaaagcagagttcagattcttttagtttcgaagaaataatagagtttgtggtatgccaattggagtgatgccatag

SEQ ID NO: 58122 - DNA, 80 bp, synthetic construct
  source 1..80: mol_type = other DNA
ttgtggtgaggtggatgtaggcagggttgcatgaatatctgttcttatagaaggttaagtgcttatgcttctcactgtgg

SEQ ID NO: 58123 - DNA, 80 bp, synthetic construct
  source 1..80: mol_type = other DNA
tccaaggaggtaggtctgtagcagatccactacggtagtgtagagaggaggaagggcacaggttatttttaaaaattagt

SEQ ID NO: 58124 - DNA, 80 bp, synthetic construct; identical to SEQ ID NO: 15188
  source 1..80: mol_type = other DNA

SEQ ID NO: 58125 - DNA, 80 bp, synthetic construct
  source 1..80: mol_type = other DNA
ttgagtaaatctcactgtatcacgggtagctcaaactcactttcccaaaattgaacttagcatccatgaaaccaatcctg

SEQ ID NO: 58126 - DNA, 80 bp, synthetic construct
  source 1..80: mol_type = other DNA
ttctttttctttttctttcttttcttttctttttttttttttttttttgagacaggatctcaatatgtcgcccaggctgg

SEQ ID NO: 58127 - DNA, 80 bp, synthetic construct
  source 1..80: mol_type = other DNA
aggtggatgtctgcctagcttagccctcaagcttctagaatagcccctttcaactaggttccatgagaattaatttcttt

SEQ ID NO: 58128 - DNA, 80 bp, synthetic construct
  source 1..80: mol_type = other DNA
attttttgtattttttagtagagacgggatttcaccgtgttagctaggatggtcttgatctcctgaccttgtgatctgcc

SEQ ID NO: 58129 - DNA, 80 bp, synthetic construct; identical to SEQ ID NO: 15189
  source 1..80: mol_type = other DNA

SEQ ID NO: 58130 - DNA, 80 bp, synthetic construct
  source 1..80: mol_type = other DNA
tactctattgcccaggttggagtgcagtggcgtgatctcggctcaccgcaacctctgcctcccaggttcaggcgattctc

SEQ ID NO: 58131 - DNA, 80 bp, synthetic construct
  source 1..80: mol_type = other DNA
ttacaggcataagccactgcacccggtccaggtgaaacatttcaaacatggctcagtaaatattgcctgattctcccaag

SEQ ID NO: 58132 - DNA, 80 bp, synthetic construct
  source 1..80: mol_type = other DNA
ttaaagttagtcaagtccagcttttcccctagaggttattcccacttttaggttatgtcctcacttctgttcatgctgtc

SEQ ID NO: 58133 - DNA, 80 bp, synthetic construct; identical to SEQ ID NO: 15190
  source 1..80: mol_type = other DNA

SEQ ID NO: 58134 - DNA, 80 bp, synthetic construct
  source 1..80: mol_type = other DNA
tgtgtgtgtgaaagaaaggagagagagagtataaaccattagggagggtgactatggaccttgtctttatctttccccag

SEQ ID NO: 58135 - DNA, 80 bp, synthetic construct
  source 1..80: mol_type = other DNA
tgtttcttttctttcaattttattttattttttttgagacagagtctcgctctatcgcccaggctggagtgcagtggctc

SEQ ID NO: 58136 - DNA, 80 bp, synthetic construct
  source 1..80: mol_type = other DNA
actcctgacctcaggtgatccacccgcctctgccttccaaagtgctgggattataggtgtgaggcaccgcacccagccta

SEQ ID NO: 58137 - DNA, 80 bp, synthetic construct; identical to SEQ ID NO: 15191
  source 1..80: mol_type = other DNA

SEQ ID NO: 58138 - DNA, 80 bp, synthetic construct
  source 1..80: mol_type = other DNA
acctgaggtccggagttccagaccagcctggccaatatggttgaaaccctgtctctactaaaaatataaaattagccaga

SEQ ID NO: 58139 - DNA, 80 bp, synthetic construct
  source 1..80: mol_type = other DNA
aataaaaaataaaaccaaaaaatacagtataacagttatggtcatgtgtcacttggcaatgcagatacattatcagaaat

SEQ ID NO: 58140 - DNA, 80 bp, synthetic construct
  source 1..80: mol_type = other DNA
ccatttgtgtatataaacatacctaaacatagaaaaggtacagttaaaatataatataaatgataaaaaatggcacacct

SEQ ID NO: 58141 - DNA, 80 bp, synthetic construct; identical to SEQ ID NO: 15192
  source 1..80: mol_type = other DNA

SEQ ID NO: 58142 - DNA, 80 bp, synthetic construct
  source 1..80: mol_type = other DNA
aacattacagcccatagactgggcagtccccggaatctctttaatggttccagagagttctctggctaaggatcggtgcc

SEQ ID NO: 58143 - DNA, 80 bp, synthetic construct
  source 1..80: mol_type = other DNA
ggtcagtttcactgtaatcctcaggcccttccagtcacccgttgccttggcaatgtcatcaccaaccttttttggagaca

SEQ ID NO: 58144 - DNA, 80 bp, synthetic construct
  source 1..80: mol_type = other DNA
ctggtgtcggatgaacccagattcaggatgaccgaagaaagttgcaccttggcctcctccgagccgaaagccgagagctt

SEQ ID NO: 58145 - DNA, 80 bp, synthetic construct
  source 1..80: mol_type = other DNA
ggctaattttgtttttttgtatttttaatagagacagggtttcaccatgttagccaggatggtctcgatctcctgacctc

SEQ ID NO: 58146 - DNA, 80 bp, synthetic construct; identical to SEQ ID NO: 15193
  source 1..80: mol_type = other DNA

SEQ ID NO: 58147 - DNA, 80 bp, synthetic construct
  source 1..80: mol_type = other DNA
tcatacccagctaattttttgtatttttagtagagatggggtttcaccgtattagtcaggatggtctcgatctcctgacc

SEQ ID NO: 58148 - DNA, 80 bp, synthetic construct
  source 1..80: mol_type = other DNA
caaactttttgttaaaaacgaagaaatatacacattagcctaggcctacatagggtcaggatcatcaacatcactggctt

SEQ ID NO: 58149 - DNA, 80 bp, synthetic construct
  source 1..80: mol_type = other DNA
ctcggctcactgcaagctccgtctcctgggttcacaccattctcctgcctcagcctccggagtagctgggactacaggtg

SEQ ID NO: 58150 - DNA, 80 bp, synthetic construct; identical to SEQ ID NO: 15194
  source 1..80: mol_type = other DNA

SEQ ID NO: 58151 - DNA, 80 bp, synthetic construct
  source 1..80: mol_type = other DNA
tatgacattaccatggctataatgtcactaggcaataggaatttttagctccattataatgttacggggctactgttgta

SEQ ID NO: 58152 - DNA, 80 bp, synthetic construct
  source 1..80: mol_type = other DNA
gaggcaggcagatcacctgaggtcaggagtttgagaccagcctggccaacatgctgaaaacctgtctctactaaaaatac

SEQ ID NO: 58153 - DNA, 80 bp, synthetic construct
  source 1..80: mol_type = other DNA
ctcaaaaaaaaaacaaaatggaggccaaggcaggcagatcaccagaggtcaggagtttgaggccagcctaatcaacatgg

SEQ ID NO: 58154 - DNA, 80 bp, synthetic construct; identical to SEQ ID NO: 15195
  source 1..80: mol_type = other DNA

SEQ ID NO: 58155 - DNA, 80 bp, synthetic construct
  source 1..80: mol_type = other DNA
atttctaattctgagaaaagcacttcttctgcccctgtcctagcaagtgtacatgccatcttaagaatgatcattctacc

SEQ ID NO: 58156 - DNA, 80 bp, synthetic construct
  source 1..80: mol_type = other DNA
gtcctgtaattcctaagtcacctcctcaattctgtagggttgaagaaccagaagccagttcctgctgttcctgtccagaa

SEQ ID NO: 58157 - DNA, 80 bp, synthetic construct
  source 1..80: mol_type = other DNA
tggatcccataaaggctagaagggaggagggatagagagcctagacttcactgacctttgtcctttctgtgttcatctta

SEQ ID NO: 58158 - DNA, 80 bp, synthetic construct; identical to SEQ ID NO: 15196
  source 1..80: mol_type = other DNA

SEQ ID NO: 58159 - DNA, 80 bp, synthetic construct
  source 1..80: mol_type = other DNA
gaagaacggaggggactgatgtcccaactagaggagaaggaggtaagggccagattttcaccagatgtcagccccgcttt

SEQ ID NO: 58160 - DNA, 80 bp, synthetic construct
  source 1..80: mol_type = other DNA
gcttcttcctacccttgactgtttgcaaagctctcatttagatctgtgtctttcttagtcctccatccctctttctttgg

SEQ ID NO: 58161 - DNA, 80 bp, synthetic construct
  source 1..80: mol_type = other DNA
tttcacttctgggcattctgcatatgtgcttccctctttctggaatgttctttgtatactacatccttccttggttcact

SEQ ID NO: 58162 - DNA, 80 bp, synthetic construct; identical to SEQ ID NO: 15197
  source 1..80: mol_type = other DNA

SEQ ID NO: 58163 - DNA, 80 bp, synthetic construct
  source 1..80: mol_type = other DNA
tgggctagaaatggagcgccggcgactgcacaaccagctgcaggaactcaagggcaacatccgtgtattctgccgggtcc

SEQ ID NO: 58164 - DNA, 80 bp, synthetic construct
  source 1..80: mol_type = other DNA
tttttcctttgaccgggtattcccaccaggaagtggacaggatgaagtgtttgaagagattgccatgcttgtccagtcag

SEQ ID NO: 58165 - DNA, 80 bp, synthetic construct
  source 1..80: mol_type = other DNA
gggctggacctacagctttgtagcaagctacgtagagatctacaatgagactgtccgggacctgctggccactggaaccc

SEQ ID NO: 58166 - DNA, 80 bp, synthetic construct; identical to SEQ ID NO: 15198
  source 1..80: mol_type = other DNA

SEQ ID NO: 58167 - DNA, 80 bp, synthetic construct
  source 1..80: mol_type = other DNA
gtcactacatctcatgtctcatcttcttgctcagctcatcctagccatgctggcctcctggctgttcctcaaccagctag

SEQ ID NO: 58168 - DNA, 80 bp, synthetic construct
  source 1..80: mol_type = other DNA
cattttcagacatactgtgcatcttattttgtttcttgacaggctagaaagcttcaagagggtgggggtgggctcttatt

SEQ ID NO: 58169 - DNA, 80 bp, synthetic construct
  source 1..80: mol_type = other DNA
gctacagatttctggggagcactccagccgaggcctgcagtgtggggcccccctcagtcttgtggacctggccgggagtg

SEQ ID NO: 58170 - DNA, 80 bp, synthetic construct
  source 1..80: mol_type = other DNA
gttggggttggctgtgcagaaccctgcctattcctaaacatctgtccccacctcaatcatctaggagtcccacgtgcctt

SEQ ID NO: 58171 - DNA, 80 bp, synthetic construct; identical to SEQ ID NO: 15199
  source 1..80: mol_type = other DNA

SEQ ID NO: 58172 - DNA, 80 bp, synthetic construct
  source 1..80: mol_type = other DNA
atttgtgcagaaaggttttgcaggtatctgaggcactgctcacctggttccatttttaattattagcttttgagttaagt

SEQ ID NO: 58173 - DNA, 80 bp, synthetic construct
  source 1..80: mol_type = other DNA
aaatcagtctgggcaacatagtgagaccctgtctctacaaaaaataggaaaattagctgggtgtaatggctcacacctgt

SEQ ID NO: 58174 - DNA, 80 bp, synthetic construct
  source 1..80: mol_type = other DNA
atcagcatacagagatcattatttttaggtctgcctagactccactatgtagctgcaccaaaatttatccaccagttccc

SEQ ID NO: 58175 - DNA, 80 bp, synthetic construct
  source 1..80: mol_type = other DNA
actattccaaatagtgtgaattcagactccaaacctcatgagggtcagccagtggctatatgaattctcactaatgagaa

SEQ ID NO: 58176 - DNA, 80 bp, synthetic construct; identical to SEQ ID NO: 15200
  source 1..80: mol_type = other DNA

SEQ ID NO: 58177 - DNA, 80 bp, synthetic construct
  source 1..80: mol_type = other DNA
tactttgatgagggtttccctcactatcttgcaagttcaattttagagggtggtgatgttttttctaactttttattaat

SEQ ID NO: 58178 - DNA, 80 bp, synthetic construct
  source 1..80: mol_type = other DNA
agttccacaaccctatcccacactgccactattatgtcgtttgttgaaggtcatttgtcctatagaatatactattctgg

SEQ ID NO: 58179 - DNA, 80 bp, synthetic construct
  source 1..80: mol_type = other DNA
ccagcagtgaccatacctggatctttatttcattaaggggtttctaaatggggatttttctaatcttagttgttctgcat

SEQ ID NO: 58180 - DNA, 80 bp, synthetic construct; identical to SEQ ID NO: 15201
  source 1..80: mol_type = other DNA

SEQ ID NO: 58181 - DNA, 80 bp, synthetic construct
  source 1..80: mol_type = other DNA
tttgggaggctgaggtgggtggatcacgaggtcaggagatcgagaccatcctaacacggtgaaaccccgtctctactaaa

SEQ ID NO: 58182 - DNA, 80 bp, synthetic construct
  source 1..80: mol_type = other DNA
caacaacaacaaaaaaaagagcctccttcagattggtgccagtgtcctttagacagaactctagtagtcttttcagattc

SEQ ID NO: 58183 - DNA, 80 bp, synthetic construct
  source 1..80: mol_type = other DNA
ttctctgctcctgtattttcttctggggcttccatctcttctcaagccttttcacctcctccaaacctagtgtgcagagg

SEQ ID NO: 58184 - DNA, 80 bp, synthetic construct; identical to SEQ ID NO: 15202
  source 1..80: mol_type = other DNA

SEQ ID NO: 58185 - DNA, 80 bp, synthetic construct
  source 1..80: mol_type = other DNA
tttgcccaagaaggcagatactttcatatctgtaaaagtgggagctgtgatctgtaccctctgccaaacgtttacgtggg

SEQ ID NO: 58186 - DNA, 80 bp, synthetic construct
  source 1..80: mol_type = other DNA
tagttataggtaactttcacccttccgccggccaccccagccccagggaagaacgttcctttggtgggtgtcggcaaatg

SEQ ID NO: 58187 - DNA, 80 bp, synthetic construct
  source 1..80: mol_type = other DNA
tcctcgcgcccttcgtctgcgccagccctggaagcacggggcgggacgtccacgggaagcggcgcgcacgcccgccgact

SEQ ID NO: 58188 - DNA, 80 bp, synthetic construct; identical to SEQ ID NO: 15203
  source 1..80: mol_type = other DNA

SEQ ID NO: 58189 - DNA, 80 bp, synthetic construct
  source 1..80: mol_type = other DNA
gggccagcctcttcttcggcgccctccaggcctgttggaggtgagggaggtggggtgaggtggtgcccgcccccccctcc

SEQ ID NO: 58190 - DNA, 80 bp, synthetic construct
  source 1..80: mol_type = other DNA
gcctggggaccccccggcctccgcctgcacgcccccccacgcccggacgtgccctctccgcgcgggggactcgcctaggt

SEQ ID NO: 58191 - DNA, 80 bp, synthetic construct
  source 1..80: mol_type = other DNA
gtcccttctcggacttgccgtcctggggagtagagaccgggactgggacacgcccccctcccggggcactcagagaagtt

SEQ ID NO: 58192 - DNA, 80 bp, synthetic construct; identical to SEQ ID NO: 15204
  source 1..80: mol_type = other DNA

SEQ ID NO: 58193 - DNA, 80 bp, synthetic construct
  source 1..80: mol_type = other DNA
ctcagggatttggagatgggggcacagatacttcattcttgatggcaaaataggcaaagaaaatggggaggctggccggg

SEQ ID NO: 58194 - DNA, 80 bp, synthetic construct
  source 1..80: mol_type = other DNA
cctacttgggagactgaggcaggagaattgcctgaacccgggaggtggaggttgcagtgagccaagattgtgccactgca

SEQ ID NO: 58195 - DNA, 80 bp, synthetic construct
  source 1..80: mol_type = other DNA
cgctctggtgcctcctcactttgggacccagcttctcctgctcccacctctggccccaggcctcggctttgggagggtca

SEQ ID NO: 58196 - DNA, 80 bp, synthetic construct; identical to SEQ ID NO: 15205
  source 1..80: mol_type = other DNA

SEQ ID NO: 58197 - DNA, 80 bp, synthetic construct
  source 1..80: mol_type = other DNA
ggtcagctgtgagaagtgtcgccatggtgagagggcaggtcacctgaatggtccagcttgctcttccctccaggatggtc

SEQ ID NO: 58198 - DNA, 80 bp, synthetic construct
  source 1..80: mol_type = other DNA
taaccatatgacctcggacaagtcccttaacctctaggagcctcagttccctgacttgtaaaataaggataatgcacccc

SEQ ID NO: 58199 - DNA, 80 bp, synthetic construct
  source 1..80: mol_type = other DNA
gggcacatcctgggtatgccgccagtgtgtctttgcgatcgccaccaaggtaaaggcacttccctgttacccttcctgtg

SEQ ID NO: 58200 - DNA, 80 bp, synthetic construct; identical to SEQ ID NO: 15206
  source 1..80: mol_type = other DNA

SEQ ID NO: 58201 - DNA, 80 bp, synthetic construct
  source 1..80: mol_type = other DNA
cccctcaggtggaacctgaaaatgctgcagtgccggagctgcctgcagtggttccatgaggcctgcacccagtgtctgag

SEQ ID NO: 58202 - DNA, 80 bp, synthetic construct
  source 1..80: mol_type = other DNA
tgcttgtgagtcttccaggggatggcacagttttcctgtgtaagtgtgtttgctccctcttgcccatgtccaggttctat

SEQ ID NO: 58203 - DNA, 80 bp, synthetic construct
  source 1..80: mol_type = other DNA
atgcctctgtggtcttgaaaactttgtttttccagggtggatgtggcccatcttgtcctgtatcacctcagtgtttgctg

SEQ ID NO: 58204 - DNA, 80 bp, synthetic construct; identical to SEQ ID NO: 15207
  source 1..80: mol_type = other DNA

SEQ ID NO: 58205 - DNA, 80 bp, synthetic construct
  source 1..80: mol_type = other DNA
aaaaggattgaggaatggcgtaaggaggaaccgttttttacagcactgaccctatatcatttctcttcttgccccagttt

SEQ ID NO: 58206 - DNA, 80 bp, synthetic construct
  source 1..80: mol_type = other DNA
gtatagagatggggaggtcttgggggtgtccgggagggggctggggggataaggaggcctcttacagcttcccttcaggg

SEQ ID NO: 58207 - DNA, 80 bp, synthetic construct
  source 1..80: mol_type = other DNA
tgcagagggcactgcaggtactggagcagggggaacccgatggagcaaatggtggggtgtgggaaggagtcaaggattat

SEQ ID NO: 58208 - DNA, 80 bp, synthetic construct; identical to SEQ ID NO: 15208
  source 1..80: mol_type = other DNA

SEQ ID NO: 58209 - DNA, 80 bp, synthetic construct
  source 1..80: mol_type = other DNA
actttccccactccaaccccagcagccccatccggatgtttgcttccttccacccttctgccagcaccgcagggacctct

SEQ ID NO: 58210 - DNA, 80 bp, synthetic construct
  source 1..80: mol_type = other DNA
ctccatttctgcccatttcttacaattgccttctctccctaggtcacccctggaacttcacattggtttccccacagaca

SEQ ID NO: 58211 - DNA, 80 bp, synthetic construct
  source 1..80: mol_type = other DNA
aggggaccctgtccgggtccttgctcggagagtacggcctgatggctctgtgcagtacctggttgagtggggaggagggg

SEQ ID NO: 58212 - DNA, 80 bp, synthetic construct; identical to SEQ ID NO: 15209
  source 1..80: mol_type = other DNA

SEQ ID NO: 58213 - DNA, 80 bp, synthetic construct
  source 1..80: mol_type = other DNA
gaagcacttatattctcccaacaaatttgcatacatgacaaaaaacaggcaaaaggcagagagacccaaagacgggattt

SEQ ID NO: 58214 - DNA, 80 bp, synthetic construct
  source 1..80: mol_type = other DNA
ttccacaggcaatgcaattacctcggccacttcgtaagggtgcacagaactacaaaataggtgggtgggggaaggggatc

SEQ ID NO: 58215 - DNA, 80 bp, synthetic construct
  source 1..80: mol_type = other DNA
atctgtcaaagctgggaccaaggaactttgggttttaatcatctaagggacaaagataaacatggttgaatcaaggagtg

SEQ ID NO: 58216 - DNA, 80 bp, synthetic construct
  source 1..80: mol_type = other DNA
cctttccactcatagctgaaaggtcagagggggagagttgtggggagcaaagaatttcccccaggaaagaggttcccagt

SEQ ID NO: 58217 - DNA, 80 bp, synthetic construct; identical to SEQ ID NO: 15210
  source 1..80: mol_type = other DNA

SEQ ID NO: 58218 - DNA, 80 bp, synthetic construct
  source 1..80: mol_type = other DNA
gaggccggcgagggctgggtcggagggcttccagaggccatggtcagcaagactcggggtagcaacaaaaggcgggaggc

SEQ ID NO: 58219 - DNA, 80 bp, synthetic construct
  source 1..80: mol_type = other DNA
agaatgcccctgaaggtgagagagaaacttggaaaataaagcaaaagctcatttcactcacacctcagggggccaacctc

SEQ ID NO: 58220 - DNA, 80 bp, synthetic construct
  source 1..80: mol_type = other DNA
cacggagaaacaaccccaggaagagcggcctcttcttacctgggtggcagccacgtgattagaaaacagcgcgcaccatg

SEQ ID NO: 58221 - DNA, 80 bp, synthetic construct; identical to SEQ ID NO: 15211
  source 1..80: mol_type = other DNA

SEQ ID NO: 58222 - DNA, 80 bp, synthetic construct
  source 1..80: mol_type = other DNA
gcctagtgacctcccctgcactgtttccgaggtcttaaggagtgggagggtctgagaaggacccttcaccccaaactcag

SEQ ID NO: 58223 - DNA, 80 bp, synthetic construct
  source 1..80: mol_type = other DNA
ttaaaacagagcgagaccctgtggtagaggatggtgaaaatggggcctagccatcttaattgaaaacccaaagcttgaga

SEQ ID NO: 58224 - DNA, 80 bp, synthetic construct
  source 1..80: mol_type = other DNA
cctgccctacataacttccctggggcccaagcacatcctgtgacccaaaaatggagagaggggccaatgagaggcagaga

SEQ ID NO: 58225 - DNA, 80 bp, synthetic construct; identical to SEQ ID NO: 15212
  source 1..80: mol_type = other DNA

SEQ ID NO: 58226 - DNA, 80 bp, synthetic construct
  source 1..80: mol_type = other DNA
tctatctccccttaagtcaggagtgtctctgtctctaagttatcagtctctgagatctgagtctggggtctctttctagg

SEQ ID NO: 58227 - DNA, 80 bp, synthetic construct
  source 1..80: mol_type = other DNA
agatatctgtaggtatggagaaccctttttagactggattttcagattttgatattgagcttctctctctgggggatctg

SEQ ID NO: 58228 - DNA, 80 bp, synthetic construct
  source 1..80: mol_type = other DNA
ctcagggtctggggtctgcatctttaggacctctgtctctctctggtgtgtttttgagtcaggggtctctctctctctca

SEQ ID NO: 58229 - DNA, 80 bp, synthetic construct; identical to SEQ ID NO: 15213
  source 1..80: mol_type = other DNA

SEQ ID NO: 58230 - DNA, 80 bp, synthetic construct
  source 1..80: mol_type = other DNA
gcaacagggggaggggcagggggcgggggagagtcggggccgagggaagggagcggctgaaatggagggagaggggagga

SEQ ID NO: 58231 - DNA, 80 bp, synthetic construct
  source 1..80: mol_type = other DNA
aggattgggttggggaaaaagctgcagaaataatttgggggtgggagctgagtgatgaggaaaacatcaaggaaatagag

SEQ ID NO: 58232 - DNA, 80 bp, synthetic construct
  source 1..80: mol_type = other DNA
aaagagaggaggatggagggagagaaggggccagatggagagagagggaggcagtggggggtggggggatggagggtcca

SEQ ID NO: 58233 - DNA, 80 bp, synthetic construct; identical to SEQ ID NO: 15214
  source 1..80: mol_type = other DNA

SEQ ID NO: 58234 - DNA, 80 bp, synthetic construct
  source 1..80: mol_type = other DNA
ccctctctggtgttcattgcctctctcttatctcttttctatgtggtcgctcccttatatctctatcacttctttactag

SEQ ID NO: 58235 - DNA, 80 bp, synthetic construct
  source 1..80: mol_type = other DNA
tccttgtcaccacaagtctgtgcctacccactttcccttaatacctcaactcttattatcatttctcttttcttgtctcc

SEQ ID NO: 58236 - DNA, 80 bp, synthetic construct
  source 1..80: mol_type = other DNA
cattcttcaccaagtccagacagtatgtgtgtgtgtgtttctagagttgttcctaagttccctgctgccaggagaaagat

SEQ ID NO: 58237 - DNA, 80 bp, synthetic construct; identical to SEQ ID NO: 15215
  source 1..80: mol_type = other DNA

SEQ ID NO: 58238 - DNA, 80 bp, synthetic construct
  source 1..80: mol_type = other DNA
gaatgaagctcaaagaccagttctcctgcagtatactcatggttatcccataaaggtgacagagtttgatcttttttcca

SEQ ID NO: 58239 - DNA, 80 bp, synthetic construct
  source 1..80: mol_type = other DNA
cctggtctcatctcagccataggcgacacttggtctactgttctctcttctcaaagttttgttcccatctccagctcttg

SEQ ID NO: 58240 - DNA, 80 bp, synthetic construct
  source 1..80: mol_type = other DNA
agtgttgaatctctgggcactgaatgggagaagagataaatttggtctctacttgtccaaacaagggcatatttcccacc

SEQ ID NO: 58241 - DNA, 80 bp, synthetic construct; identical to SEQ ID NO: 15216
  source 1..80: mol_type = other DNA

SEQ ID NO: 58242 - DNA, 80 bp, synthetic construct
  source 1..80: mol_type = other DNA
atatctgacaccaacttctctgtttttctcctgccaattttgcggcacctctaccttattttcctgaagtagatggagag

SEQ ID NO: 58243 - DNA, 80 bp, synthetic construct
  source 1..80: mol_type = other DNA
tttcccctttgtataaatgcttgtcttgtgttcctttagagttgccaggtgtctcactttcaactgtgatctcctgaagg

SEQ ID NO: 58244 - DNA, 80 bp, synthetic construct
  source 1..80: mol_type = other DNA
atcgtcctggttggaaccctcggttctgcatcatctcggggaaccagctgctcatgctggatgaggatgaggtgagtgtg

SEQ ID NO: 58245 - DNA, 80 bp, synthetic construct; identical to SEQ ID NO: 15217
  source 1..80: mol_type = other DNA

SEQ ID NO: 58246 - DNA, 80 bp, synthetic construct
  source 1..80: mol_type = other DNA
tttctccatcagggggcagagtgcaagaagagaaattgcaggacgcagagaaaaggcaggggatagaggaggttttaggt

SEQ ID NO: 58247 - DNA, 80 bp, synthetic construct
  source 1..80: mol_type = other DNA
gagtatgtggagttatctaaaggagtacaagtggagtaggggcagggactagccagagtaaaggagatgaaacggacaga

SEQ ID NO: 58248 - DNA, 80 bp, synthetic construct
  source 1..80: mol_type = other DNA
ttgggggacaagctttaaaaaatggtagggtagcctggaaaaccaaacgtggtgagagatggaccctgaaagttattggg

SEQ ID NO: 58249 - DNA, 80 bp, synthetic construct; identical to SEQ ID NO: 15218
  source 1..80: mol_type = other DNA

SEQ ID NO: 58250 - DNA, 80 bp, synthetic construct
  source 1..80: mol_type = other DNA
gccggtctggagcaggaagggcgtgtgtgtgggaggaggagtagatagaattgggaaaatgagcagcctgaacagacgca

SEQ ID NO: 58251 - DNA, 80 bp, synthetic construct
  source 1..80: mol_type = other DNA
gtgatggctgaggggaagaagggaactgagagatgctgggtcgggtgatggaaggagatgaaaggtgggggaaggtgacc

SEQ ID NO: 58252 - DNA, 80 bp, synthetic construct
  source 1..80: mol_type = other DNA
aaagcagggagaatggaggaactgaaggtcaagggaaaactggattcaggaagtagctaacttctgaggagttgcagaag

SEQ ID NO: 58253 - DNA, 80 bp, synthetic construct; identical to SEQ ID NO: 15219
  source 1..80: mol_type = other DNA

SEQ ID NO: 58254 - DNA, 80 bp, synthetic construct
  source 1..80: mol_type = other DNA
ccccacggcgagcatggtacggcggccgagcaggctctcatgacccggacaggcgcggggagagggctgaagatggaccg

SEQ ID NO: 58255 - DNA, 80 bp, synthetic construct
  source 1..80: mol_type = other DNA
ttcgctccctttctcctctccagcagtgaagtttgactattttcctggtgcttgtaaaaatagtctccttagatctttag

SEQ ID NO: 58256 - DNA, 80 bp, synthetic construct
  source 1..80: mol_type = other DNA
ccctgttttctcctctcatcagctgcttctattttctgcaattgtatcaccctttctctttcctccctgatttctcttat

SEQ ID NO: 58257 - DNA, 80 bp, synthetic construct; identical to SEQ ID NO: 15220
  source 1..80: mol_type = other DNA

SEQ ID NO: 58258 - DNA, 80 bp, synthetic construct
  source 1..80: mol_type = other DNA
gacccctttttcccaccagctccccctcccttcaggaattcaagctaccagtttctctcccttagagagccagtgacctg

SEQ ID NO: 58259 - DNA, 80 bp, synthetic construct
  source 1..80: mol_type = other DNA
gaggcaaagtcaggtggtggtggagtgtatacagagaatgtgtgtgatgtctgtcacatctgtgtgtatatgtatatgtg

SEQ ID NO: 58260 - DNA, 80 bp, synthetic construct
  source 1..80: mol_type = other DNA
ggcagatctgcccacttattccccatctttctccttatcctgagtcctcagggtctaggggtctctggcgggggtctccc

SEQ ID NO: 58261 - DNA, 80 bp, synthetic construct; identical to SEQ ID NO: 15221
  source 1..80: mol_type = other DNA

SEQ ID NO: 58262 - DNA, 80 bp, synthetic construct
  source 1..80: mol_type = other DNA
tggtgggtggcctggtttgttttgggggtccccttgcccccctcccccgtctctctcgcgctgtctccgggcgacagggc

SEQ ID NO: 58263 - DNA, 80 bp, synthetic construct
  source 1..80: mol_type = other DNA
gccgggcggcgcgagccgggccgtaccgccccctctccctccgcaccccgcccttcccccgcgcaggggcggggcccctc

SEQ ID NO: 58264 - DNA, 80 bp, synthetic construct
  source 1..80: mol_type = other DNA
gcggcggcggcggcagctgctccctccgcatgttctcgctgcatcttccgagtggggggagttatggtaaccggaggggg

SEQ ID NO: 58265 - DNA, 80 bp, synthetic construct; identical to SEQ ID NO: 15222
  source 1..80: mol_type = other DNA

SEQ ID NO: 58266 - DNA, 80 bp, synthetic construct
  source 1..80: mol_type = other DNA
tatgagcaggattttctgtgtccctggtggcaggtgtgtgtctttgcatgtgtgttccagcactggcctgagtatctgtg

SEQ ID NO: 58267 - DNA, 80 bp, synthetic construct
  source 1..80: mol_type = other DNA
ttaaaaagggaagaaatggggtaaagaggaaaagtggggaggggataggagagaaggaatgagagaggcttgaagaagag

SEQ ID NO: 58268 - DNA, 80 bp, synthetic construct
  source 1..80: mol_type = other DNA
ggggaggagagagtcaggccttctggtaaagtgatctctgaaagaagaaagggaagaagatgggagaaggcactggattc

SEQ ID NO: 58269 - DNA, 80 bp, synthetic construct; identical to SEQ ID NO: 15223
  source 1..80: mol_type = other DNA

SEQ ID NO: 58270 - DNA, 80 bp, synthetic construct
  source 1..80: mol_type = other DNA
tgtgtacacagggtgtgtacatgtgtgggtgtgtgcacaatgcctgtgttacgggtttgtgtaggtggctgttatgtgtg

SEQ ID NO: 58271 - DNA, 80 bp, synthetic construct
  source 1..80: mol_type = other DNA
cactctgccccccctttcctctgtgtttctgctattcttttcctgcggcaacaaaagtgtttaataagcatatgtgtatg

SEQ ID NO: 58272 - DNA, 80 bp, synthetic construct
  source 1..80: mol_type = other DNA
ttagactttatgcctttattagatgagcttgcacatgaaaataatggctgagctcggttccctgaaatgagagtgaggca

SEQ ID NO: 58273 - DNA, 80 bp, synthetic construct; identical to SEQ ID NO: 15224
  source 1..80: mol_type = other DNA

SEQ ID NO: 58274 - DNA, 80 bp, synthetic construct
  source 1..80: mol_type = other DNA
cccctgcatggggatatgtgtgtcttagggttataggtccatttctgtagtgtgctgtccacatgattgcccaagagact

SEQ ID NO: 58275 - DNA, 80 bp, synthetic construct
  source 1..80: mol_type = other DNA
tgtctgtatgtctcaaaagcacatagatccccagttatttttctgtattgtggttctcatatacacgtacctccatagct

SEQ ID NO: 58276 - DNA, 80 bp, synthetic construct
  source 1..80: mol_type = other DNA
tctggaagcagacagtgaaaatataattgtggtcctcccttgttctgttctggaacctagagggttaacaggcagctctt

SEQ ID NO: 58277 - DNA, 80 bp, synthetic construct; identical to SEQ ID NO: 15225
  source 1..80: mol_type = other DNA

SEQ ID NO: 58278 - DNA, 80 bp, synthetic construct
  source 1..80: mol_type = other DNA
tccccccaccaaccttctgagcccctgccactgcagtgcacgtggaaccggctccttctcccttccccccacctgcccct

SEQ ID NO: 58279 - DNA, 80 bp, synthetic construct
  source 1..80: mol_type = other DNA
ccagggggaagaggaaagcctgcctatgggcaatgacctttaacccatctttccccccagctagccccttctggggtggg

SEQ ID NO: 58280 - DNA, 80 bp, synthetic construct
  source 1..80: mol_type = other DNA
ccccctccttcccgctgccagcctctccgccgtcgctgctcttcctgctgctttccggggggtaggtgaggccggagctg

SEQ ID NO: 58281 - DNA, 80 bp, synthetic construct; identical to SEQ ID NO: 15226
  source 1..80: mol_type = other DNA

SEQ ID NO: 58282 - DNA, 80 bp, synthetic construct
  source 1..80: mol_type = other DNA
gccctcccaccttctccaagctgtgtgtgtgtgtatatgtgtgtgtgtgtgtgcttgcactgtacccgtgggagcaagga

SEQ ID NO: 58283 - DNA, 80 bp, synthetic construct
  source 1..80: mol_type = other DNA
ggcttcctgagccgacggctaaaaagctccatcaaacgaacgaagtcacaacccaaacttgaccggaccagcagctttcg

SEQ ID NO: 58284 - DNA, 80 bp, synthetic construct
  source 1..80: mol_type = other DNA
tgtgcaaaggttgaaggattcaactcaagttggttgggggatgtcatggcacaggggacagaacagaaaagaactagaat

SEQ ID NO: 58285 - DNA, 80 bp, synthetic construct; identical to SEQ ID NO: 15227
  source 1..80: mol_type = other DNA

SEQ ID NO: 58286 - DNA, 80 bp, synthetic construct
  source 1..80: mol_type = other DNA
acagaatgggaagcaacccatggactgaggcatgaagaagcagccagcggagaagtccagaaggcactgtccctgagacc

SEQ ID NO: 58287 - DNA, 80 bp, synthetic construct
  source 1..80: mol_type = other DNA
agtgagtcacacctttccctgcccccctcccatgttgccagagctggatttggggccggcagggggtgagggcatggtat

SEQ ID NO: 58288 - DNA, 80 bp, synthetic construct
  source 1..80: mol_type = other DNA
ctgcccatctccataccgcttttgtattgctatcctacccctcattattccatgcccctagccccctttatcttctgccc

SEQ ID NO: 58289 - DNA, 80 bp, synthetic construct; identical to SEQ ID NO: 15228
  source 1..80: mol_type = other DNA

SEQ ID NO: 58290 - DNA, 80 bp, synthetic construct
  source 1..80: mol_type = other DNA
ctgtgttcattcattctttgaatcattaaatgtttatcaggcactagccgtgtgccaggcccaggctagacatatctctt

SEQ ID NO: 58291 - DNA, 80 bp, synthetic construct
  source 1..80: mol_type = other DNA
ttttcttttctgccatggtccatttctgggttgagatatttctagatgtccccagtcctcgcaatcccttaggtgtgaga

SEQ ID NO: 58292 - DNA, 80 bp, synthetic construct
  source 1..80: mol_type = other DNA
caggggagttccttaaaggattctgatttttctcacatccctcacgtccttcctgataggcagggtttctttctgtgtct

SEQ ID NO: 58293 - DNA, 80 bp, synthetic construct
  source 1..80: mol_type = other DNA
gagtttgagaccagcctgaccaacagggtgaaaccccgtctcagctaaaaatacaaaaaaaaaaaagaaaaaaaaattag

SEQ ID NO: 58294 - DNA, 80 bp, synthetic construct; identical to SEQ ID NO: 15229
  source 1..80: mol_type = other DNA

SEQ ID NO: 58295 - DNA, 80 bp, synthetic construct
  source 1..80: mol_type = other DNA
gaggtctagagaaagtggcacaggtggggacatcaaggaaacagaaacttctgggactggaggaaagggtaggccaggga

SEQ ID NO: 58296 - DNA, 80 bp, synthetic construct
  source 1..80: mol_type = other DNA
agacaaatggattgagaatctgcagcgggcagtaaagcccaacaaggtattggggaataaaggggacacaacctgtgcag

SEQ ID NO: 58297 - DNA, 80 bp, synthetic construct
  source 1..80: mol_type = other DNA
ctgctaccctgccttacgatctctttccctgccatagaagtcatagacttacagagttgatggggctctggaaattcttt

SEQ ID NO: 58298 - DNA, 80 bp, synthetic construct; identical to SEQ ID NO: 15230
  source 1..80: mol_type = other DNA

SEQ ID NO: 58299 - DNA, 80 bp, synthetic construct
  source 1..80: mol_type = other DNA
acacactgcaatatcacctgagccttaccattagcttgtgctcaattgtatccccccaggcccttactgattcttttttt

SEQ ID NO: 58300 - DNA, 80 bp, synthetic construct
  source 1..80: mol_type = other DNA
tttgtatttttagtagagacgaggtttcaccatgttggccaggctagtctcaaactcctgacctcaggttgtctgcctgc

SEQ ID NO: 58301 - DNA, 80 bp, synthetic construct
  source 1..80: mol_type = other DNA
agcttttgaaatctttccaatactgtttgtgttgtctagtgtatgtctacgcttctacagtagcttcctggggctgctat

SEQ ID NO: 58302 - DNA, 80 bp, synthetic construct; identical to SEQ ID NO: 15231
  source 1..80: mol_type = other DNA

SEQ ID NO: 58303 - DNA, 80 bp, synthetic construct
  source 1..80: mol_type = other DNA
cctctccatataaagacaccagtttttataaggtgggttaagggtccactctaattcagtatggcctcttttttttgaga

SEQ ID NO: 58304 - DNA, 80 bp, synthetic construct
  source 1..80: mol_type = other DNA
ttttattagagacggggtttcactatgttggccaggctggctcgaactcctgacctcaggcaatccacccacctcggcct

SEQ ID NO: 58305 - DNA, 80 bp, synthetic construct
  source 1..80: mol_type = other DNA
ttatgattgctgtctgtatcccactttcttactgtctctcctcttttggtgtctctctgtcccttccccctttaacatca

SEQ ID NO: 58306 - DNA, 80 bp, synthetic construct
  source 1..80: mol_type = other DNA
ctctggggacaccgtcttctggggcgagcacttcgagtttaacaacctgccggctgtccgtgccctgcggctgcatctgt

SEQ ID NO: 58307 - DNA, 80 bp, synthetic construct; identical to SEQ ID NO: 15232
  source 1..80: mol_type = other DNA

SEQ ID NO: 58308 - DNA, 80 bp, synthetic construct
  source 1..80: mol_type = other DNA
caaggtgagtgttgtgccctcagggaaaggtgacttgggaatgggcacttgcttgggggttagtgaggacagggcaaatt

SEQ ID NO: 58309 - DNA, 80 bp, synthetic construct
  source 1..80: mol_type = other DNA
gactgattggtcagaaatacctcaaggatgccattggtatggcccacactcaggccctcttcttcccaaacctgccagat

SEQ ID NO: 58310 - DNA, 80 bp, synthetic construct
  source 1..80: mol_type = other DNA
cccccaggagaattcatccgtgctctgtatgaatctgaggaaaactgcgaggtagaccctatcaagtgcacagcatccag

SEQ ID NO: 58311 - DNA, 80 bp, synthetic construct; identical to SEQ ID NO: 15233
  source 1..80: mol_type = other DNA

SEQ ID NO: 58312 - DNA, 80 bp, synthetic construct
  source 1..80: mol_type = other DNA
gggtaggctttgaagactggtttaggttctgatatatggacatagttggcaagaaagacatttcagaagaaggctgtgag

SEQ ID NO: 58313 - DNA, 80 bp, synthetic construct
  source 1..80: mol_type = other DNA
tcaaggagtctgaggtcattggtaggccttgggatgccattaaaggtgtcagaaatattgtgatttagaagattaatcca

SEQ ID NO: 58314 - DNA, 80 bp, synthetic construct
  source 1..80: mol_type = other DNA
gtaatcccagctattcgggaggctaaggcaggagaatcacttgaatctgggaggtggaggttgtagtgagccgagatcac

SEQ ID NO: 58315 - DNA, 80 bp, synthetic construct; identical to SEQ ID NO: 15234
  source 1..80: mol_type = other DNA

SEQ ID NO: 58316 - DNA, 80 bp, synthetic construct
  source 1..80: mol_type = other DNA
gaggtgtgggggcgatggtgagctctgctttacaccagccgagtttaaggtgtcagtgggacattgaagtggaactggga

SEQ ID NO: 58317 - DNA, 80 bp, synthetic construct
  source 1..80: mol_type = other DNA
tgtttttcttctcctcctctccttgtctctctcccacacccctccatctctctcccacgtgtctctcccctcaccttctc

SEQ ID NO: 58318 - DNA, 80 bp, synthetic construct
  source 1..80: mol_type = other DNA
gaagctgagggtctctggggctcagtcccggtctctctctttctctctctctctctctgtctccccgacccttcccccca

SEQ ID NO: 58319 - DNA, 80 bp, synthetic construct; identical to SEQ ID NO: 15235
  source 1..80: mol_type = other DNA

SEQ ID NO: 58320 - DNA, 80 bp, synthetic construct
  source 1..80: mol_type = other DNA
tgtgtgtgtgtgtatgtgacctttatcttctgcattcttggctaggtttacctcaaaggaggactttctgggcttcatga

SEQ ID NO: 58321 - DNA, 80 bp, synthetic construct
  source 1..80: mol_type = other DNA
cagcaaggtcagcagatcccctctttgccctatccccagatggctccagaggttcctggagcctgagaaactaccctttg

SEQ ID NO: 58322 - DNA, 80 bp, synthetic construct
  source 1..80: mol_type = other DNA
ccccggctcctcaacgacatcagcacagctctgaggaaccccaacatccaaaggcagccaagccgccagagtgagcggcc

SEQ ID NO: 58323 - DNA, 80 bp, synthetic construct; identical to SEQ ID NO: 15236
  source 1..80: mol_type = other DNA

SEQ ID NO: 58324 - DNA, 80 bp, synthetic construct
  source 1..80: mol_type = other DNA
agccagcatgtcatgtcagccatgtgtcaaaatgttcaaacatctcagtaatagctagtgaataagcacttcccccagcc

SEQ ID NO: 58325 - DNA, 80 bp, synthetic construct
  source 1..80: mol_type = other DNA
ttttcctctgcccgtgtcttcctccatgacaccatacccatcccaccattcccgcctctcctttcatttgtccacatctc

SEQ ID NO: 58326 - DNA, 80 bp, synthetic construct
  source 1..80: mol_type = other DNA
cctactcctctcctctcctcctccatggacctcatctcctccatatgtgcccagccctgcccccatcccttctcttgctg

SEQ ID NO: 58327 - DNA, 80 bp, synthetic construct; identical to SEQ ID NO: 15237
  source 1..80: mol_type = other DNA

SEQ ID NO: 58328 - DNA, 80 bp, synthetic construct
  source 1..80: mol_type = other DNA
gaagatgctgagtgtcaacaagagtgtgtccatgctggacttacagggtgatgggcctggtggccgcctcaacagcagca

SEQ ID NO: 58329 - DNA, 80 bp, synthetic construct
  source 1..80: mol_type = other DNA
cacagacggtgtccctgcccagcaactgcgaatccccctctccttccagaaccctctcttccacatggctgctgatgggc

SEQ ID NO: 58330 - DNA, 80 bp, synthetic construct
  source 1..80: mol_type = other DNA
ccccaagccccctgctgcctccatccttcatagccacagctacagtgatgagtttggaccctctggcactgacttcaccc

SEQ ID NO: 58331 - DNA, 80 bp, synthetic construct; identical to SEQ ID NO: 15238
  source 1..80: mol_type = other DNA

SEQ ID NO: 58332 - DNA, 80 bp, synthetic construct
  source 1..80: mol_type = other DNA
agaaggagatggggggtggggttgaaacagagtctgtggcctgaagttacaatcttcttgcctccttttggccattaaac

SEQ ID NO: 58333 - DNA, 80 bp, synthetic construct
  source 1..80: mol_type = other DNA
agatcctgaatcagaacaacaggagaaattctctggcattcaactcacatctctggcattcagaggtgataaaggctaca

SEQ ID NO: 58334 - DNA, 80 bp, synthetic construct
  source 1..80: mol_type = other DNA
tgagcggacagtggcctgggtctccaacatgcctcacctgtcggctgacatcgagagtgcccacatcgagcgggaagagt

SEQ ID NO: 58335 - DNA, 80 bp, synthetic construct; identical to SEQ ID NO: 15239
  source 1..80: mol_type = other DNA

SEQ ID NO: 58336 - DNA, 80 bp, synthetic construct
  source 1..80: mol_type = other DNA
ggaaatgttactttactggcagtaggagctaataaattggatggggatggagggggttgcagctatattacaagtgatgt

SEQ ID NO: 58337 - DNA, 80 bp, synthetic construct
  source 1..80: mol_type = other DNA
aggctgagggcaaagggcaccaagagctctggggctaacacagataacttagcagaaagttacttgaggaagctgttgtt

SEQ ID NO: 58338 - DNA, 80 bp, synthetic construct
  source 1..80: mol_type = other DNA
accagcaaatttaatgagaattaaaccctaatattagccccaaggcagccaccgtaggaagttaattcacatctctcctc

SEQ ID NO: 58339 - DNA, 80 bp, synthetic construct
  source 1..80: mol_type = other DNA
ttctgtaatctgtagtgttcacatgtgtctagttgtgattcaggaactgaatttttagatctatttaattttaattttgt

SEQ ID NO: 58340 - DNA, 80 bp, synthetic construct; identical to SEQ ID NO: 15240
  source 1..80: mol_type = other DNA

SEQ ID NO: 58341 - DNA, 80 bp, synthetic construct
  source 1..80: mol_type = other DNA
agcacagctgtagactctagagccaatagggcagataaaatgactcttctgagctcttccagctctggaattcctagatt

SEQ ID NO: 58342 - DNA, 80 bp, synthetic construct
  source 1..80: mol_type = other DNA
accctatttttaatttctgagcacagttactcaaggtgtgtttgtgagtgtaggtttctgtgtgggtcttcatgaggggc

SEQ ID NO: 58343 - DNA, 80 bp, synthetic construct
  source 1..80: mol_type = other DNA
tgtgcttggcagacagggatggaggctgggtggtgggcttggggtggggcgcccctcatagtgcggggtcgtgtgcccgg

SEQ ID NO: 58344 - DNA, 80 bp, synthetic construct; identical to SEQ ID NO: 15241
  source 1..80: mol_type = other DNA

SEQ ID NO: 58345 - DNA, 80 bp, synthetic construct
  source 1..80: mol_type = other DNA
ttagtgcattaaatatctctttaccaaaccctgacctctcttctgatagagtagcttcggaagcccttggaaaatgtacc

SEQ ID NO: 58346 - DNA, 80 bp, synthetic construct
  source 1..80: mol_type = other DNA
ggaaaggtgttctgttagaaagggtcttttagcctgtgtatgttttcagctgctccagcaagtcctgggctccaaagagg

SEQ ID NO: 58347 - DNA, 80 bp, synthetic construct
  source 1..80: mol_type = other DNA
aaaaccactgctctaattgatatcctttatgataaatcacctcgaggatcttcacagtgaggtgacatgggggatgcaga

SEQ ID NO: 58348 - DNA, 80 bp, synthetic construct; identical to SEQ ID NO: 15242
  source 1..80: mol_type = other DNA

SEQ ID NO: 58349 - DNA, 80 bp, synthetic construct
  source 1..80: mol_type = other DNA
gctcaggtggaaattacaatgtcatttatcttctccgtgtcccatccccatccatcccactgtctttcgtgcactcacta

SEQ ID NO: 58350 - DNA, 80 bp, synthetic construct
  source 1..80: mol_type = other DNA
ttcccactcctctctgcatctcaggaccttctctaccagaaccttggtctttctgcccctagaccccacctagttccaag

SEQ ID NO: 58351 - DNA, 80 bp, synthetic construct
  source 1..80: mol_type = other DNA
gggacccatcacctctgttctcttggctccctaattttcctgtctccttggcagctcctgcatagcttcctcttcctgac

SEQ ID NO: 58352 - DNA, 80 bp, synthetic construct; identical to SEQ ID NO: 15243
  source 1..80: mol_type = other DNA

SEQ ID NO: 58353 - DNA, 80 bp, synthetic construct
  source 1..80: mol_type = other DNA
ccctccaacacctccggagcctctcccctctcactgctgccctccacacccagagaacctccacagactccagccctccg

SEQ ID NO: 58354 - DNA, 80 bp, synthetic construct
  source 1..80: mol_type = other DNA
tcccagcctcctcctgactctaagccctcctcttcctctacctctccagtgtatgtctgtcaccccccatttcaccagag

SEQ ID NO: 58355 - DNA, 80 bp, synthetic construct
  source 1..80: mol_type = other DNA
taatcttggttctctaccctcctttccactcctcacctgattctctctcttcctcctccttatatctgtgaggcagaagg

SEQ ID NO: 58356 - DNA, 80 bp, synthetic construct; identical to SEQ ID NO: 15244
  source 1..80: mol_type = other DNA

SEQ ID NO: 58357 - DNA, 80 bp, synthetic construct
  source 1..80: mol_type = other DNA
ttgccggacacatcaccctacctaaaaagccagtaaatgagaacctgtcagctatagccatcatttctgagatgcgattt

SEQ ID NO: 58358 - DNA, 80 bp, synthetic construct
  source 1..80: mol_type = other DNA
gtagctggtgatctataaagatgctaaaaggcaccaggggactttgccatttaaaggactcctgcagtgaattcttttgt

SEQ ID NO: 58359 - DNA, 80 bp, synthetic construct
  source 1..80: mol_type = other DNA
ttccctgctctcccgccatactcaggataccctaccataagtgatttcctctcactgacttgcagaaaatgtgtgagata

SEQ ID NO: 58360 - DNA, 80 bp, synthetic construct
  source 1..80: mol_type = other DNA
acttggaaggttttgtatcctaaggtcagacatagctatattaccaagcctaaatgccatgtggcccaggaaataatttg

SEQ ID NO: 58361 - DNA, 80 bp, synthetic construct; identical to SEQ ID NO: 15245
  source 1..80: mol_type = other DNA

SEQ ID NO: 58362 - DNA, 80 bp, synthetic construct
  source 1..80: mol_type = other DNA
gggagaaggactgaaaagaagatgggagtggaaaagaataaagccagtttctgcttcccagggatgcagagattggggca

SEQ ID NO: 58363 - DNA, 80 bp, synthetic construct
  source 1..80: mol_type = other DNA
gaagatggccactgtgaataagtgacaaacggaatgacagtgtctatttaatgaaatgcatgtcttcaaaatatatacag

SEQ ID NO: 58364 - DNA, 80 bp, synthetic construct
  source 1..80: mol_type = other DNA
aatgcaagctcagtttttcttcagattatgaagaaattccaaatccacaggggtttggattaatgaggttttgctgtact

SEQ ID NO: 58365 - DNA, 80 bp, synthetic construct; identical to SEQ ID NO: 15246
  source 1..80: mol_type = other DNA

SEQ ID NO: 58366 - DNA, 80 bp, synthetic construct
  source 1..80: mol_type = other DNA
ctaggggactggcatccaggcccccttgaagcgtctcaataagtccgcgctctcctttttggtgtcttgcaggagaggca

SEQ ID NO: 58367 - DNA, 80 bp, synthetic construct
  source 1..80: mol_type = other DNA
tctcttcctttcctgtgcaccccaccctgtaacagcaccaaccaccaggattggacatcaccgaggaacagcgggattgc

SEQ ID NO: 58368 - DNA, 80 bp, synthetic construct
  source 1..80: mol_type = other DNA
accccgtacagaccccttcactccggggtgctatccccatcctctgcctcatcgttcccctgagcactgggggacagacc

SEQ ID NO: 58369 - DNA, 80 bp, synthetic construct; identical to SEQ ID NO: 15247
  source 1..80: mol_type = other DNA

SEQ ID NO: 58370 - DNA, 80 bp, synthetic construct
  source 1..80: mol_type = other DNA
agtgtgttgggtggggtggaattgaggttagggtgaggggtcagggtttaggagggtgtgtatgttgggaggacaggcta

SEQ ID NO: 58371 - DNA, 80 bp, synthetic construct
  source 1..80: mol_type = other DNA
ccttccatgactctgtcccctgggggaggtaggacagggctgggcttccctctcatcctccccctcccaatctccttcca

SEQ ID NO: 58372 - DNA, 80 bp, synthetic construct
  source 1..80: mol_type = other DNA
acccagccttgcccccttcatccttttgcgtttggtattgagactctcctagactctactcctctttcttttgtatggac

SEQ ID NO: 58373 - DNA, 80 bp, synthetic construct; identical to SEQ ID NO: 15248
  source 1..80: mol_type = other DNA

SEQ ID NO: 58374 - DNA, 80 bp, synthetic construct
  source 1..80: mol_type = other DNA
ctcccagccccatttcctttttttctggagtgtgtggtgaaacagaaaaaaacatgtttaataaacggagattgttcttt

SEQ ID NO: 58375 - DNA, 80 bp, synthetic construct
  source 1..80: mol_type = other DNA
tctcctcatagaatgtcactctcccctcccaatgagattttttatattttagagcaggagttttgcaccggccaaacttc

SEQ ID NO: 58376 - DNA, 80 bp, synthetic construct
  source 1..80: mol_type = other DNA
ataaggtttctttaattgctggttaaaatgctcccgtgcagaaaacaggaaagaacctgcctggttccttagcaaatctg

SEQ ID NO: 58377 - DNA, 80 bp, synthetic construct; identical to SEQ ID NO: 15249
  source 1..80: mol_type = other DNA

SEQ ID NO: 58378 - DNA, 80 bp, synthetic construct
  source 1..80: mol_type = other DNA
acgaggcttgtaggctgccgttcctcgattggctacggctctagctccgcccgccgcacttggcgacggtgtccggcggg

SEQ ID NO: 58379 - DNA, 80 bp, synthetic construct
  source 1..80: mol_type = other DNA
gcactgtgaggcggaacggagcggcggggcaggagctgttctgggcaggtgaaggcaggctggtggctgaaggacctcct

SEQ ID NO: 58380 - DNA, 80 bp, synthetic construct
  source 1..80: mol_type = other DNA
tttgagaagatgtggctccctttatccagggcttctgtgacctccatctttttcctctgcagccttcatcccgcgtggag

SEQ ID NO: 58381 - DNA, 80 bp, synthetic construct; identical to SEQ ID NO: 15250
  source 1..80: mol_type = other DNA

SEQ ID NO: 58382 - DNA, 80 bp, synthetic construct
  source 1..80: mol_type = other DNA
tgctcatctccttgtggccagtggccttcaaatgtggcaggtagtagatcagtgctcagaaattcttagagaattagaaa

SEQ ID NO: 58383 - DNA, 80 bp, synthetic construct
  source 1..80: mol_type = other DNA
gggaggggagggaagtgaactgggagaagtgctgcaaattcaggtggaagaagaagaggaggaggaggaagatgatgatg

SEQ ID NO: 58384 - DNA, 80 bp, synthetic construct
  source 1..80: mol_type = other DNA
tgcactgccccccaaaatcttctacattaagcaggaacccttcgagcctaaggaggagatatcaggaagcggaactcagc

SEQ ID NO: 58385 - DNA, 80 bp, synthetic construct; identical to SEQ ID NO: 15251
  source 1..80: mol_type = other DNA

SEQ ID NO: 58386 - DNA, 80 bp, synthetic construct
  source 1..80: mol_type = other DNA
ccttttggctgtggcatctgcaacaagcgcttcaagctgaagcaccatctgacagagcacatgaagacccatgctggagc

SEQ ID NO: 58387 - DNA, 80 bp, synthetic construct
  source 1..80: mol_type = other DNA
gctgatggatacttttccctcactgccatggcacaccagtcatggatcttgtaatcatgccaagagaatagatacattat

SEQ ID NO: 58388 - DNA, 80 bp, synthetic construct
  source 1..80: mol_type = other DNA
acttaagttgatcacttgcccatggtggacatttttgtggtggtgatgtccattaaggaaaccagattttcaattattta

SEQ ID NO: 58389 - DNA, 80 bp, synthetic construct
  source 1..80: mol_type = other DNA
aagcagaagtccttttgtgtacttttaaaattgtatctttccaggagcccctcagattgtaccttgctttctcaccaata

SEQ ID NO: 58390 - DNA, 80 bp, synthetic construct; identical to SEQ ID NO: 15252
  source 1..80: mol_type = other DNA

SEQ ID NO: 58391 - DNA, 80 bp, synthetic construct
  source 1..80: mol_type = other DNA
cccctctgttgagatatggaggggacagatactggaatcgggggtgggacttgcagttacttaaaattttttaataaact

SEQ ID NO: 58392 - DNA, 80 bp, synthetic construct
  source 1..80: mol_type = other DNA
caagaacactcttctggacttaggccctgacctgctacttaataaccttcagtaggttgccttactgttttgttttgttt

SEQ ID NO: 58393 - DNA, 80 bp, synthetic construct
  source 1..80: mol_type = other DNA
tagctggggttatcaggcatccgccaccatgcctggctaagttttttgtatttttagtagagacggggtttcaccgtgtt

SEQ ID NO: 58394 - DNA, 80 bp, synthetic construct; identical to SEQ ID NO: 15253
  source 1..80: mol_type = other DNA

SEQ ID NO: 58395 - DNA, 80 bp, synthetic construct
  source 1..80: mol_type = other DNA
cgcctggctaattttgtatttttaggagagatggggttttagcatgttggccagtctggtcttgaactcctgacctcagg

SEQ ID NO: 58396 - DNA, 80 bp, synthetic construct
  source 1..80: mol_type = other DNA
gggattccaggcatgagccaccgcacctggctggttcacatgatctttataatattccccaacttcctgtgttctctgtg

SEQ ID NO: 58397 - DNA, 80 bp, synthetic construct
  source 1..80: mol_type = other DNA
gataagttgatgatagtgggcagtacaaaccacttgaatggcacaaagaaagctaagtaaagaccttctctaggtcagca

SEQ ID NO: 58398 - DNA, 80 bp, synthetic construct
  source 1..80: mol_type = other DNA
ccttccccaaagtttgtttctgaaagttatgaggtatggcactcagaagggtctgaaaaatgtgactgtggctaagaagg

SEQ ID NO: 58399 - DNA, 80 bp, synthetic construct; identical to SEQ ID NO: 15254
  source 1..80: mol_type = other DNA

SEQ ID NO: 58400 - DNA, 80 bp, synthetic construct
  source 1..80: mol_type = other DNA
cagtttgggatgatgactcattcttgtttcttgtgtcactcatctcaagataaaatttcccagggaaagaactctaagcc

SEQ ID NO: 58401 - DNA, 80 bp, synthetic construct
  source 1..80: mol_type = other DNA
tgttacacattttgggatcccaaagcctcaggtatacttgctacttagtgggtgttcaagatacgctgaagctgcccaac

SEQ ID NO: 58402 - DNA, 80 bp, synthetic construct
  source 1..80: mol_type = other DNA
aagattttggtttaaacaaataaacttgttacctctctgcctctgtccttcagaagatgcagtggaggagatgtccaatc

SEQ ID NO: 58403 - DNA, 80 bp, synthetic construct
  source 1..80: mol_type = other DNA
tagtgtcaaaggatagccccattcccagagcctttgctcttttaattatcacttctctcctttatctttcccctctctgt

SEQ ID NO: 58404 - DNA, 80 bp, synthetic construct; identical to SEQ ID NO: 15255
  source 1..80: mol_type = other DNA

SEQ ID NO: 58405 - DNA, 80 bp, synthetic construct
  source 1..80: mol_type = other DNA
gaatggcaatcattaaaaagtcaggaaacaacaggtgctggagaggatgtggagaaataggaacacttttacactgttgg

SEQ ID NO: 58406 - DNA, 80 bp, synthetic construct
  source 1..80: mol_type = other DNA
attgcggcactattcacgatagcaaagacttggaaccaatccaaatgtccaacaactgtagattggattaagaaaatgtg

SEQ ID NO: 58407 - DNA, 80 bp, synthetic construct
  source 1..80: mol_type = other DNA
atgagaacacatggacacaggaaggggaaaatcacactctggggactgttgtggggtggggggacgggggagggatagca

SEQ ID NO: 58408 - DNA, 80 bp, synthetic construct; identical to SEQ ID NO: 15256
  source 1..80: mol_type = other DNA

SEQ ID NO: 58409 - DNA, 80 bp, synthetic construct
  source 1..80: mol_type = other DNA
tgattttttttccccacgcagaactcatgttaaaattcctgggtgactttatccactcttctgagttgaaccatttaaat

SEQ ID NO: 58410 - DNA, 80 bp, synthetic construct
  source 1..80: mol_type = other DNA
tcccgaatagctgggattataggcacttgccaccatgcccagctaatttttgtatttttagtagagacagagtttcacca

SEQ ID NO: 58411 - DNA, 80 bp, synthetic construct
  source 1..80: mol_type = other DNA
tttcctttctttttcaacaagtgcctgctgtataccagacactgaagaaaaaagcagaaggcatcataggggcttggact

SEQ ID NO: 58412 - DNA, 80 bp, synthetic construct; identical to SEQ ID NO: 15257
  source 1..80: mol_type = other DNA

SEQ ID NO: 58413 - DNA, 80 bp, synthetic construct
  source 1..80: mol_type = other DNA
aaaaattaatgtttcaccactctccagcttaaacctttcattggcttcctcttgctctttcatgaggtccaagtgatctg

SEQ ID NO: 58414 - DNA, 80 bp, synthetic construct
  source 1..80: mol_type = other DNA
ctatgtgctctgatagctcttaattccccatatttttcaatttcctttattcaataagtacttgcatttggaagggggcg

SEQ ID NO: 58415 - DNA, 80 bp, synthetic construct
  source 1..80: mol_type = other DNA
aaaataaaagttgagaaaaaaacatacttgccaactacctactgttactcatgtgtgggcactgctctaggcacaatgat

SEQ ID NO: 58416 - DNA, 80 bp, synthetic construct
  source 1..80: mol_type = other DNA
ctgggattacaggcatgtgccaccatgcccagctaattttcgtatttttagtagagacagggtttcaccattttggccag

SEQ ID NO: 58417 - DNA, 80 bp, synthetic construct; identical to SEQ ID NO: 15258
  source 1..80: mol_type = other DNA

SEQ ID NO: 58418 - DNA, 80 bp, synthetic construct
  source 1..80: mol_type = other DNA
cagatgcccaagccaagaaagagaaaaagaatggtttgcttaacaaggagaccagtggacctagagctacagggaaagag

SEQ ID NO: 58419 - DNA, 80 bp, synthetic construct
  source 1..80: mol_type = other DNA
agagtgaatattggctcattagggggcaagagtggaagtggggagaccaatcagaccattttagtagtgcagacaagaga

SEQ ID NO: 58420 - DNA, 80 bp, synthetic construct
  source 1..80: mol_type = other DNA
agaggtcatttaatgagtggaagacaggaataaaagaacttgggaatggatcaagagttttgtataggctaggcacagtg

SEQ ID NO: 58421 - DNA, 80 bp, synthetic construct
  source 1..80: mol_type = other DNA
gggaggctgaggcaggagaatcacttgaacccaggaggtgggggttgcagtgagccacgcaccactgcactccagcctgg

SEQ ID NO: 58422 - DNA, 80 bp, synthetic construct; identical to SEQ ID NO: 15259
  source 1..80: mol_type = other DNA

SEQ ID NO: 58423 - DNA, 80 bp, synthetic construct
  source 1..80: mol_type = other DNA
aataataattgaatgcaatttttttgtaatacagatttgctgattaattggggttcaaatttagtgttccccatcatcaa

SEQ ID NO: 58424 - DNA, 80 bp, synthetic construct
  source 1..80: mol_type = other DNA
ctacaggcgcatgccaccacgcctggctaatttttgtatttatattagagatggggttttgccattttggccaggctggt

SEQ ID NO: 58425 - DNA, 80 bp, synthetic construct; identical to SEQ ID NO: 15260
  source 1..80: mol_type = other DNA

SEQ ID NO: 58426 - DNA, 80 bp, synthetic construct
  source 1..80: mol_type = other DNA
ctcacaagatctgatgggtttatcaggggtttctgcttttgcttattcctcattttctcttgccaccaccatgtaagaag

SEQ ID NO: 58427 - DNA, 80 bp, synthetic construct
  source 1..80: mol_type = other DNA
aaaagatacccgaaaatgtggaagtgactttggaactggataacaggcagaggttggaacagtttggagggctcagaaga

SEQ ID NO: 58428 - DNA, 80 bp, synthetic construct
  source 1..80: mol_type = other DNA
gttttagcaaagagactggtggcattttgcccctgccccagagatttgtggaactttaaacttgagagagatgatttagg

SEQ ID NO: 58429 - DNA, 80 bp, synthetic construct
  source 1..80: mol_type = other DNA
ttcaagcctgctgcagaaatttgcataagtagcaaggagcctaatgttaatcccaagactgtggggaaactatctccagg

SEQ ID NO: 58430 - DNA, 80 bp, synthetic construct; identical to SEQ ID NO: 15261
  source 1..80: mol_type = other DNA

SEQ ID NO: 58431 - DNA, 80 bp, synthetic construct
  source 1..80: mol_type = other DNA
acacaaagtccctagtggggcattgcctagtggagctgtgagaagagggcactgtcctccaaactccagaatggtagatt

SEQ ID NO: 58432 - DNA, 80 bp, synthetic construct
  source 1..80: mol_type = other DNA
ctggagtcaaaggagatcattttggagctttaaaatttcactgtcctgctggatttctgacttgcatgggccctgtaacc

SEQ ID NO: 58433 - DNA, 80 bp, synthetic construct
  source 1..80: mol_type = other DNA
tgggttaatgctaaaatgagttaagactgggggactgttgggaaggcataattggttttgaaatacgaggacatgagatt

SEQ ID NO: 58434 - DNA, 80 bp, synthetic construct
  source 1..80: mol_type = other DNA
aataagtctcacaagatctgatgggtttatcaggggtttccgcttttgcatcttcctcattttctcttgccaccgccatg

SEQ ID NO: 58435 - DNA, 80 bp, synthetic construct; identical to SEQ ID NO: 15262
  source 1..80: mol_type = other DNA

SEQ ID NO: 58436 - DNA, 80 bp, synthetic construct
  source 1..80: mol_type = other DNA
cccacagctaagttttgtattttttgtagagacagggtttctacaaaaaccctggccaggctggtctcaaactcctgggc

SEQ ID NO: 58437 - DNA, 80 bp, synthetic construct
  source 1..80: mol_type = other DNA
ttgtatgggaatggagattttggttcttgttttagcttttgatgacaggaaatatgtaaagtagcttaaccttacctgtg

SEQ ID NO: 58438 - DNA, 80 bp, synthetic construct
  source 1..80: mol_type = other DNA
gagtttgagaccagcctgggtaacacagtgaaaccccttctctactaaagtgcaaaaatttagccaggagtggttgtgca

SEQ ID NO: 58439 - DNA, 80 bp, synthetic construct; identical to SEQ ID NO: 15263
  source 1..80: mol_type = other DNA

SEQ ID NO: 58440 - DNA, 80 bp, synthetic construct
  source 1..80: mol_type = other DNA
cctggtgacacacagtttacctatataacaaatctgcccatgtacccctaaacctaaaataaaagtttttaaaaaagatt

SEQ ID NO: 58441 - DNA, 80 bp, synthetic construct
  source 1..80: mol_type = other DNA
gactaattggatgagtcctacccatataatcaaggataatctactttacttagagtcagttgattataagtgttaattat

SEQ ID NO: 58442 - DNA, 80 bp, synthetic construct
  source 1..80: mol_type = other DNA
gaaaattttctacctcagccctgagctcgagaaaatctcaacacctctttgccaccactatgtcaatgaactgctgtatg

SEQ ID NO: 58443 - DNA, 80 bp, synthetic construct; identical to SEQ ID NO: 15264
  source 1..80: mol_type = other DNA

SEQ ID NO: 58444 - DNA, 80 bp, synthetic construct
  source 1..80: mol_type = other DNA
atgttaagaccatgagatgcaaatgaagttcactgttgacacactggttcaataacacatgataaattcaaatattcttc

SEQ ID NO: 58445 - DNA, 80 bp, synthetic construct
  source 1..80: mol_type = other DNA
acatcttagtaggttctacttcaggctgtacggaagtagtgttttctcaacctttttgaaaatattatcctatgtaattg

SEQ ID NO: 58446 - DNA, 80 bp, synthetic construct
  source 1..80: mol_type = other DNA
tattgatgtttatcccagtgtcctcaactcttcaagcagctgttcttgatgaataagagtcttaaacaaatttattttct

SEQ ID NO: 58447 - DNA, 80 bp, synthetic construct; identical to SEQ ID NO: 15265
  source 1..80: mol_type = other DNA

SEQ ID NO: 58448 - DNA, 80 bp, synthetic construct
  source 1..80: mol_type = other DNA
ccgccaccacgcccggctaatttttttgtatttttagtagagacggggtttcaccgtgttagccaggatggtctcgatct

SEQ ID NO: 58449 - DNA, 80 bp, synthetic construct
  source 1..80: mol_type = other DNA
ccaggcctgcatgctggagtgcagtggtgtgatcttgcctcactgcaacatccgcctcccgggttcaagtgattctcctg

SEQ ID NO: 58450 - DNA, 80 bp, synthetic construct
  source 1..80: mol_type = other DNA
tacaggcatgagcaaccaagcctgtccaagtctcatttcttaataaacaaaatataggttgggtgcagtggctcatgcct

SEQ ID NO: 58451 - DNA, 80 bp, synthetic construct; identical to SEQ ID NO: 15266
  source 1..80: mol_type = other DNA

SEQ ID NO: 58452 - DNA, 80 bp, synthetic construct
  source 1..80: mol_type = other DNA
aaaaagatctaattatcaatttacagaaaatgacgcagagggcagggaaacacattaaatcacaccaaagtggtacaatc

SEQ ID NO: 58453 - DNA, 80 bp, synthetic construct
  source 1..80: mol_type = other DNA
tgtaaaagaggcctggcacagtggctcactcttgtaatcccaacactttaggaggataagcaagaggatgacttgagccc

SEQ ID NO: 58454 - DNA, 80 bp, synthetic construct; identical to SEQ ID NO: 15267
  source 1..80: mol_type = other DNA

SEQ ID NO: 58455 - DNA, 80 bp, synthetic construct
  source 1..80: mol_type = other DNA
cccgagtagctgggattataggcatgcaccaccatgcccggccaatttttatatttttagtagagatggggtttctgcat

SEQ ID NO: 58456 - DNA, 80 bp, synthetic construct
  source 1..80: mol_type = other DNA
ggctcacgcctgtaatcccagcactttgggaggctgaggcgggcggatcacaaggtcaggagatcgagaccatcctggct

SEQ ID NO: 58457 - DNA, 80 bp, synthetic construct
  source 1..80: mol_type = other DNA
ctgggtgacagagcgagactccgtctcaaaaaaaaaaaaaaaaatttcagttgtgggctgggcgcggcagctcacgcctg

SEQ ID NO: 58458 - DNA, 80 bp, synthetic construct
  source 1..80: mol_type = other DNA
ccgaggcaggagaatgacgtgaacccgggaggcggagcttgcagtgagctgagatcccgccactgcactccagcctgggt

SEQ ID NO: 58459 - DNA, 80 bp, synthetic construct; identical to SEQ ID NO: 15268
  source 1..80: mol_type = other DNA

SEQ ID NO: 58460 - DNA, 80 bp, synthetic construct
  source 1..80: mol_type = other DNA
tctggtccaagttaataaataaaactattcttatttgcttaaccttaaaataatcagaggctccacatattgatgtaaag

SEQ ID NO: 58461 - DNA, 80 bp, synthetic construct
  source 1..80: mol_type = other DNA
aaaaacgggagaggagttgaggaggtaaaaacagaagcaagactccatgtgctttgagactgctccttgtatactttgag

SEQ ID NO: 58462 - DNA, 80 bp, synthetic construct
  source 1..80: mol_type = other DNA
gtgcgcccctgtggccccagctactcaggaggtgagaggatcacttgagtccaggaggtgaaagctgcagtgagccatga

SEQ ID NO: 58463 - DNA, 80 bp, synthetic construct
  source 1..80: mol_type = other DNA
tggcgcaatctcggctcactataacctctgcctcccatgttcaagcaattctcctgcctcagcctcctgagtagctggga

SEQ ID NO: 58464 - DNA, 80 bp, synthetic construct; identical to SEQ ID NO: 15269
  source 1..80: mol_type = other DNA

SEQ ID NO: 58465 - DNA, 80 bp, synthetic construct
  source 1..80: mol_type = other DNA
gacggagtctccttgtcacccaggctggagtgcagtggtgcgatcttggctcactgcaaactccgccttctgggttcaag

SEQ ID NO: 58466 - DNA, 80 bp, synthetic construct
  source 1..80: mol_type = other DNA
aatgctgggatttcaggcatgagccactgcagccggccaggaaccagtatttttagtacaagagaaatgatacaattata

SEQ ID NO: 58467 - DNA, 80 bp, synthetic construct
  source 1..80: mol_type = other DNA
aggaaatcaagaccatcctggctaacatggtgaaaccctatctctactaaaaatacaaaaacaaaattagccgggtgtgg

SEQ ID NO: 58468 - DNA, 80 bp, synthetic construct; identical to SEQ ID NO: 15270
  source 1..80: mol_type = other DNA

SEQ ID NO: 58469 - DNA, 80 bp, synthetic construct
  source 1..80: mol_type = other DNA
ggctgcagtgaaccaagatcacactaccacactccagcctaggagacagagtgagaccttgtctcaaaaaatatataaaa

SEQ ID NO: 58470 - DNA, 80 bp, synthetic construct
  source 1..80: mol_type = other DNA
cctaatgtccatgctgtgctctctaataccattccacattaaaacaagatgtggctcattgggaaactgttgatttcagg

SEQ ID NO: 58471 - DNA, 80 bp, synthetic construct
  source 1..80: mol_type = other DNA
aacatggtgaaaccccatctctactaaaaattcaaaaaacctagccaggtgtggtggtgcgcacctgtagtccccagcta

SEQ ID NO: 58472 - DNA, 80 bp, synthetic construct; identical to SEQ ID NO: 15271
  source 1..80: mol_type = other DNA

SEQ ID NO: 58473 - DNA, 80 bp, synthetic construct
  source 1..80: mol_type = other DNA
tttaggccgggtgcagtgactcatgcctgtaatcgcagcactttgcgagccctagacaggcagattgcttgagctcagga

SEQ ID NO: 58474 - DNA, 80 bp, synthetic construct
  source 1..80: mol_type = other DNA
agccgagatcgccccattgcattccagcctgggtgacagagccagaacctgtctcaacaagaaaaaaaaaaagcatttat

SEQ ID NO: 58475 - DNA, 80 bp, synthetic construct
  source 1..80: mol_type = other DNA
gatctcagctcactgcaacctccgcctcccaggctcaagtgattcttgtgcctcaacttcctgagtagctgggattacag

SEQ ID NO: 58476 - DNA, 80 bp, synthetic construct; identical to SEQ ID NO: 15272
  source 1..80: mol_type = other DNA

SEQ ID NO: 58477 - DNA, 80 bp, synthetic construct
  source 1..80: mol_type = other DNA
tcccaaaaggaaaacattaactataaatggagtgatcagaatgtcaccaccctaatctaggtaggggtcaactttagcat

SEQ ID NO: 58478 - DNA, 80 bp, synthetic construct
  source 1..80: mol_type = other DNA
aattctaatccattcctaaaaacacgctggatagtgaattttcgatagtgggagtctgtatgtcattattttaaatggga

SEQ ID NO: 58479 - DNA, 80 bp, synthetic construct
  source 1..80: mol_type = other DNA
agatacaaattatgttttcctttaactgcaacaaatgtgaacagtgaaataatgtgtgaaagacacataatgaaggtaaa

SEQ ID NO: 58480 - DNA, 80 bp, synthetic construct
  source 1..80: mol_type = other DNA
tgtggtccctgttgctgttagcggaagataaaagcgaacaaaatgagctgtggaaggagtgagtgaaacagtgaatgcct

SEQ ID NO: 58481 - DNA, 80 bp, synthetic construct; identical to SEQ ID NO: 15273
  source 1..80: mol_type = other DNA

SEQ ID NO: 58482 - DNA, 80 bp, synthetic construct
  source 1..80: mol_type = other DNA
ctcctgtctcagcctccccagttgggagtagttgggattacaggtgcgcgccacctcggccagctgatttttgtgtcttt

SEQ ID NO: 58483 - DNA, 80 bp, synthetic construct
  source 1..80: mol_type = other DNA
tcataatctcttataagcaaacagcgatcattctgtcttcatgattaaaatttcctttaaaaatttgtcatcagttatta

SEQ ID NO: 58484 - DNA, 80 bp, synthetic construct
  source 1..80: mol_type = other DNA
gttgactgccttttcactgtgtcttctcatggtctttccccagtgtgtgcacatcactggtgtcttttattctagatttt

SEQ ID NO: 58485 - DNA, 80 bp, synthetic construct
  source 1..80: mol_type = other DNA
gggaatacaggctcccgccaccacgcccagctaattttttgtatttagtagagatagggtttctccatattggtcaggct

SEQ ID NO: 58486 - DNA, 80 bp, synthetic construct; identical to SEQ ID NO: 15274
  source 1..80: mol_type = other DNA

SEQ ID NO: 58487 - DNA, 80 bp, synthetic construct
  source 1..80: mol_type = other DNA
ttgaaaggaacacagtaagctagaaggtggtgatgattgcacagctttccagatccacaattattttaataatttgtctt

SEQ ID NO: 58488 - DNA, 80 bp, synthetic construct
  source 1..80: mol_type = other DNA
acttcagttgtttcattttgtaatgtggcgaactgacacagaaaatgcataacattagtctgtctatcttttcacccata

SEQ ID NO: 58489 - DNA, 80 bp, synthetic construct
  source 1..80: mol_type = other DNA
atttcagaagtgatatctttataatattgcattttcccattcatgtggtatagcctttcatttatttaagtccttactat

SEQ ID NO: 58490 - DNA, 80 bp, synthetic construct; identical to SEQ ID NO: 15275
  source 1..80: mol_type = other DNA

SEQ ID NO: 58491 - DNA, 80 bp, synthetic construct
  source 1..80: mol_type = other DNA
ggtgtggtggctcacacctgtaatcccagcactttgggaggccaaggagggtggatcacctgaggtcaggagtttgagac
